United States Patent Application Publication US 2024/0018598 A1 - sequence listing, part 3

SEQ ID NO: 45391 - DNA, 33 bp, synthetic construct
  misc_feature 1..33: note = Probe
  source 1..33: mol_type = other DNA
agtaaataataggagcttaaacccccttatttc

SEQ ID NO: 45392 - DNA, 37 bp, synthetic construct; identical to SEQ ID NO: 3499
  misc_feature 1..37: note = Probe
  source 1..37: mol_type = other DNA

SEQ ID NO: 45393 - DNA, 38 bp, synthetic construct; identical to SEQ ID NO: 3500
  misc_feature 1..38: note = Probe
  source 1..38: mol_type = other DNA

SEQ ID NO: 45394 - DNA, 16 bp, synthetic construct
  misc_feature 1..16: note = Probe
  source 1..16: mol_type = other DNA
agtaaggtcagctaaa

SEQ ID NO: 45395 - DNA, 17 bp, synthetic construct
  misc_feature 1..17: note = Probe
  source 1..17: mol_type = other DNA
agtaaggtcagctaaat

SEQ ID NO: 45396 - DNA, 18 bp, synthetic construct
  misc_feature 1..18: note = Probe
  source 1..18: mol_type = other DNA
agtaaggtcagctaaata

SEQ ID NO: 45397 - DNA, 19 bp, synthetic construct
  misc_feature 1..19: note = Probe
  source 1..19: mol_type = other DNA
agtaaggtcagctaaataa

SEQ ID NO: 45398 - DNA, 20 bp, synthetic construct
  misc_feature 1..20: note = Probe
  source 1..20: mol_type = other DNA
agtaaggtcagctaaataag

SEQ ID NO: 45399 - DNA, 21 bp, synthetic construct
  misc_feature 1..21: note = Probe
  source 1..21: mol_type = other DNA
agtaaggtcagctaaataagc

SEQ ID NO: 45400 - DNA, 22 bp, synthetic construct
  misc_feature 1..22: note = Probe
  source 1..22: mol_type = other DNA
agtaaggtcagctaaataagct

SEQ ID NO: 45401 - DNA, 23 bp, synthetic construct
  misc_feature 1..23: note = Probe
  source 1..23: mol_type = other DNA
agtaaggtcagctaaataagcta

SEQ ID NO: 45402 - DNA, 24 bp, synthetic construct
  misc_feature 1..24: note = Probe
  source 1..24: mol_type = other DNA
agtaaggtcagctaaataagctat

SEQ ID NO: 45403 - DNA, 25 bp, synthetic construct
  misc_feature 1..25: note = Probe
  source 1..25: mol_type = other DNA
agtaaggtcagctaaataagctatc

SEQ ID NO: 45404 - DNA, 26 bp, synthetic construct
  misc_feature 1..26: note = Probe
  source 1..26: mol_type = other DNA
agtaaggtcagctaaataagctatcg

SEQ ID NO: 45405 - DNA, 27 bp, synthetic construct
  misc_feature 1..27: note = Probe
  source 1..27: mol_type = other DNA
agtaaggtcagctaaataagctatcgg

SEQ ID NO: 45406 - DNA, 28 bp, synthetic construct
  misc_feature 1..28: note = Probe
  source 1..28: mol_type = other DNA
agtaaggtcagctaaataagctatcggg

SEQ ID NO: 45407 - DNA, 29 bp, synthetic construct
  misc_feature 1..29: note = Probe
  source 1..29: mol_type = other DNA
agtaaggtcagctaaataagctatcgggc

SEQ ID NO: 45408 - DNA, 30 bp, synthetic construct; identical to SEQ ID NO: 3514
  misc_feature 1..30: note = Probe
  source 1..30: mol_type = other DNA

SEQ ID NO: 45409 - DNA, 31 bp, synthetic construct; identical to SEQ ID NO: 3515
  misc_feature 1..31: note = Probe
  source 1..31: mol_type = other DNA

SEQ ID NO: 45410 - DNA, 32 bp, synthetic construct; identical to SEQ ID NO: 3516
  misc_feature 1..32: note = Probe
  source 1..32: mol_type = other DNA

SEQ ID NO: 45411 - DNA, 33 bp, synthetic construct; identical to SEQ ID NO: 3517
  misc_feature 1..33: note = Probe
  source 1..33: mol_type = other DNA

SEQ ID NO: 45412 - DNA, 34 bp, synthetic construct; identical to SEQ ID NO: 3518
  misc_feature 1..34: note = Probe
  source 1..34: mol_type = other DNA

SEQ ID NO: 45413 - DNA, 35 bp, synthetic construct; identical to SEQ ID NO: 3519
  misc_feature 1..35: note = Probe
  source 1..35: mol_type = other DNA

SEQ ID NO: 45414 - DNA, 36 bp, synthetic construct; identical to SEQ ID NO: 3520
  misc_feature 1..36: note = Probe
  source 1..36: mol_type = other DNA

SEQ ID NO: 45415 - DNA, 37 bp, synthetic construct; identical to SEQ ID NO: 3521
  misc_feature 1..37: note = Probe
  source 1..37: mol_type = other DNA

SEQ ID NO: 45416 - DNA, 38 bp, synthetic construct; identical to SEQ ID NO: 3522
  misc_feature 1..38: note = Probe
  source 1..38: mol_type = other DNA

SEQ ID NO: 45417 - DNA, 39 bp, synthetic construct; identical to SEQ ID NO: 3523
  misc_feature 1..39: note = Probe
  source 1..39: mol_type = other DNA

SEQ ID NO: 45418 - DNA, 40 bp, synthetic construct; identical to SEQ ID NO: 3524
  misc_feature 1..40: note = Probe
  source 1..40: mol_type = other DNA

SEQ ID NO: 45419 - DNA, 41 bp, synthetic construct; identical to SEQ ID NO: 3525
  misc_feature 1..41: note = Probe
  source 1..41: mol_type = other DNA

SEQ ID NO: 45420 - DNA, 42 bp, synthetic construct; identical to SEQ ID NO: 3526
  misc_feature 1..42: note = Probe
  source 1..42: mol_type = other DNA

SEQ ID NO: 45421 - DNA, 43 bp, synthetic construct; identical to SEQ ID NO: 3527
  misc_feature 1..43: note = Probe
  source 1..43: mol_type = other DNA

SEQ ID NO: 45422 - DNA, 44 bp, synthetic construct; identical to SEQ ID NO: 3528
  misc_feature 1..44: note = Probe
  source 1..44: mol_type = other DNA

SEQ ID NO: 45423 - DNA, 45 bp, synthetic construct; identical to SEQ ID NO: 3529
  misc_feature 1..45: note = Probe
  source 1..45: mol_type = other DNA

SEQ ID NO: 45424 - DNA, 46 bp, synthetic construct; identical to SEQ ID NO: 3530
  misc_feature 1..46: note = Probe
  source 1..46: mol_type = other DNA

SEQ ID NO: 45425 - DNA, 47 bp, synthetic construct; identical to SEQ ID NO: 3531
  misc_feature 1..47: note = Probe
  source 1..47: mol_type = other DNA

SEQ ID NO: 45426 - DNA, 48 bp, synthetic construct; identical to SEQ ID NO: 3532
  misc_feature 1..48: note = Probe
  source 1..48: mol_type = other DNA

SEQ ID NO: 45427 - DNA, 49 bp, synthetic construct; identical to SEQ ID NO: 3533
  misc_feature 1..49: note = Probe
  source 1..49: mol_type = other DNA

SEQ ID NO: 45428 - DNA, 50 bp, synthetic construct; identical to SEQ ID NO: 3534
  misc_feature 1..50: note = Probe
  source 1..50: mol_type = other DNA

SEQ ID NO: 45429 - DNA, 16 bp, synthetic construct
  misc_feature 1..16: note = Probe
  source 1..16: mol_type = other DNA
agtaccgttaacttcc

SEQ ID NO: 45430 - DNA, 17 bp, synthetic construct
  misc_feature 1..17: note = Probe
  source 1..17: mol_type = other DNA
agtaccgttaacttcca

SEQ ID NO: 45431 - DNA, 27 bp, synthetic construct
  misc_feature 1..27: note = Probe
  source 1..27: mol_type = other DNA
agtaccgttaacttccaattaactagt

SEQ ID NO: 45432 - DNA, 28 bp, synthetic construct
  misc_feature 1..28: note = Probe
  source 1..28: mol_type = other DNA
agtaccgttaacttccaattaactagtt

SEQ ID NO: 45433 - DNA, 31 bp, synthetic construct; identical to SEQ ID NO: 16865
  misc_feature 1..31: note = Probe
  source 1..31: mol_type = other DNA

SEQ ID NO: 45434 - DNA, 32 bp, synthetic construct; identical to SEQ ID NO: 3536
  misc_feature 1..32: note = Probe
  source 1..32: mol_type = other DNA

SEQ ID NO: 45435 - DNA, 35 bp, synthetic construct; identical to SEQ ID NO: 12743
  misc_feature 1..35: note = Probe
  source 1..35: mol_type = other DNA

SEQ ID NO: 45436 - DNA, 49 bp, synthetic construct
  misc_feature 1..49: note = Probe
  source 1..49: mol_type = other DNA
agtaccgttaacttccaattaactagttttgacaacattcaaaaaagag

SEQ ID NO: 45437 - DNA, 50 bp, synthetic construct; identical to SEQ ID NO: 3540
  misc_feature 1..50: note = Probe
  source 1..50: mol_type = other DNA

SEQ ID NO: 45438 - DNA, 23 bp, synthetic construct
  misc_feature 1..23: note = Probe
  source 1..23: mol_type = other DNA
agtcagaggttcaattcctcttc

SEQ ID NO: 45439 - DNA, 24 bp, synthetic construct
  misc_feature 1..24: note = Probe
  source 1..24: mol_type = other DNA
agtcagaggttcaattcctcttct

SEQ ID NO: 45440 - DNA, 25 bp, synthetic construct
  misc_feature 1..25: note = Probe
  source 1..25: mol_type = other DNA
agtcagaggttcaattcctcttctt

SEQ ID NO: 45441 - DNA, 26 bp, synthetic construct
  misc_feature 1..26: note = Probe
  source 1..26: mol_type = other DNA
agtcagaggttcaattcctcttctta

SEQ ID NO: 45442 - DNA, 32 bp, synthetic construct; identical to SEQ ID NO: 3546
  misc_feature 1..32: note = Probe
  source 1..32: mol_type = other DNA

SEQ ID NO: 45443 - DNA, 17 bp, synthetic construct
  misc_feature 1..17: note = Probe
  source 1..17: mol_type = other DNA
agtcccattggtctagt

SEQ ID NO: 45444 - DNA, 16 bp, synthetic construct
  misc_feature 1..16: note = Probe
  source 1..16: mol_type = other DNA
agtccgtgcgagaata

SEQ ID NO: 45445 - DNA, 19 bp, synthetic construct
  misc_feature 1..19: note = Probe
  source 1..19: mol_type = other DNA
agtccgtgcgagaataatg

SEQ ID NO: 45446 - DNA, 20 bp, synthetic construct
  misc_feature 1..20: note = Probe
  source 1..20: mol_type = other DNA
agtcggtagagcatcagact

SEQ ID NO: 45447 - DNA, 23 bp, synthetic construct
  misc_feature 1..23: note = Probe
  source 1..23: mol_type = other DNA
agtcggtagagcatcagactttt

SEQ ID NO: 45448 - DNA, 16 bp, synthetic construct
  misc_feature 1..16: note = Probe
  source 1..16: mol_type = other DNA
agtcggtagagcatga

SEQ ID NO: 45449 - DNA, 18 bp, synthetic construct
  misc_feature 1..18: note = Probe
  source 1..18: mol_type = other DNA
agtcggtagagcatgaga

SEQ ID NO: 45450 - DNA, 19 bp, synthetic construct
  misc_feature 1..19: note = Probe
  source 1..19: mol_type = other DNA
agtcggtagagcatgagac

SEQ ID NO: 45451 - DNA, 36 bp, synthetic construct; identical to SEQ ID NO: 346
  misc_feature 1..36: note = Probe
  source 1..36: mol_type = other DNA

SEQ ID NO: 45452 - DNA, 37 bp, synthetic construct; identical to SEQ ID NO: 3556
  misc_feature 1..37: note = Probe
  source 1..37: mol_type = other DNA

SEQ ID NO: 45453 - DNA, 18 bp, synthetic construct
  misc_feature 1..18: note = Probe
  source 1..18: mol_type = other DNA
agtcggtagagcatggga

SEQ ID NO: 45454 - DNA, 19 bp, synthetic construct
  misc_feature 1..19: note = Probe
  source 1..19: mol_type = other DNA
agtcggtagagcatgggac

SEQ ID NO: 45455 - DNA, 36 bp, synthetic construct; identical to SEQ ID NO: 354
  misc_feature 1..36: note = Probe
  source 1..36: mol_type = other DNA

SEQ ID NO: 45456 - DNA, 22 bp, synthetic construct
  misc_feature 1..22: note = Probe
  source 1..22: mol_type = other DNA
agtctcataatctgaaggtcct

SEQ ID NO: 45457 - DNA, 26 bp, synthetic construct
  misc_feature 1..26: note = Probe
  source 1..26: mol_type = other DNA
agtctcataatctgaaggtcctgagt

SEQ ID NO: 45458 - DNA, 50 bp, synthetic construct
  misc_feature 1..50: note = Probe
  source 1..50: mol_type = other DNA
agtctcataatctgaaggtcctgagttcgaacctcagagggggcagctgc

SEQ ID NO: 45459 - DNA, 21 bp, synthetic construct
  misc_feature 1..21: note = Probe
  source 1..21: mol_type = other DNA
agtctcataatctgaaggtcg

SEQ ID NO: 45460 - DNA, 24 bp, synthetic construct
  misc_feature 1..24: note = Probe
  source 1..24: mol_type = other DNA
agtctcataatctgaaggtcgtga

SEQ ID NO: 45461 - DNA, 26 bp, synthetic construct
  misc_feature 1..26: note = Probe
  source 1..26: mol_type = other DNA
agtctcataatctgaaggtcgtgagt

SEQ ID NO: 45462 - DNA, 50 bp, synthetic construct
  misc_feature 1..50: note = Probe
  source 1..50: mol_type = other DNA
agtctcataatctgaaggtcgtgagttcgatcctcacacggggcacaata

SEQ ID NO: 45463 - DNA, 43 bp, synthetic construct; identical to SEQ ID NO: 3569
  misc_feature 1..43: note = Probe
  source 1..43: mol_type = other DNA

SEQ ID NO: 45464 - DNA, 18 bp, synthetic construct
  misc_feature 1..18: note = Probe
  source 1..18: mol_type = other DNA
agtgaagcattggactgt

SEQ ID NO: 45465 - DNA, 18 bp, synthetic construct
  misc_feature 1..18: note = Probe
  source 1..18: mol_type = other DNA
agtgcacttggacgaacc

SEQ ID NO: 45466 - DNA, 34 bp, synthetic construct; identical to SEQ ID NO: 16917
  misc_feature 1..34: note = Probe
  source 1..34: mol_type = other DNA

SEQ ID NO: 45467 - DNA, 35 bp, synthetic construct
  misc_feature 1..35: note = Probe
  source 1..35: mol_type = other DNA
agtgcccggctagctcagtcggtagagcatgagac

SEQ ID NO: 45468 - DNA, 36 bp, synthetic construct; identical to SEQ ID NO: 16918
  misc_feature 1..36: note = Probe
  source 1..36: mol_type = other DNA

SEQ ID NO: 45469 - DNA, 24 bp, synthetic construct
  misc_feature 1..24: note = Probe
  source 1..24: mol_type = other DNA
agtggggttttgcagtccttagct

SEQ ID NO: 45470 - DNA, 17 bp, synthetic construct
  misc_feature 1..17: note = Probe
  source 1..17: mol_type = other DNA
agtggtagaattctcgc

SEQ ID NO: 45471 - DNA, 18 bp, synthetic construct
  misc_feature 1..18: note = Probe
  source 1..18: mol_type = other DNA
agtggtagaattctcgcc

SEQ ID NO: 45472 - DNA, 19 bp, synthetic construct
  misc_feature 1..19: note = Probe
  source 1..19: mol_type = other DNA
agtggtagaattctcgcct

SEQ ID NO: 45473 - DNA, 20 bp, synthetic construct
  misc_feature 1..20: note = Probe
  source 1..20: mol_type = other DNA
agtggtagaattctcgcctg

SEQ ID NO: 45474 - DNA, 22 bp, synthetic construct
  misc_feature 1..22: note = Probe
  source 1..22: mol_type = other DNA
agtggtagaattctcgcctgcc

SEQ ID NO: 45475 - DNA, 17 bp, synthetic construct
  misc_feature 1..17: note = Probe
  source 1..17: mol_type = other DNA
agtggtatcatgcaaga

SEQ ID NO: 45476 - DNA, 27 bp, synthetic construct
  misc_feature 1..27: note = Probe
  source 1..27: mol_type = other DNA
agtggtcatcacgttcgcctaacacgc

SEQ ID NO: 45477 - DNA, 40 bp, synthetic construct; identical to SEQ ID NO: 16943
  misc_feature 1..40: note = Probe
  source 1..40: mol_type = other DNA

SEQ ID NO: 45478 - DNA, 17 bp, synthetic construct
  misc_feature 1..17: note = Probe
  source 1..17: mol_type = other DNA
agtggtgagtatccccg

SEQ ID NO: 45479 - DNA, 18 bp, synthetic construct
  misc_feature 1..18: note = Probe
  source 1..18: mol_type = other DNA
agtggtgagtatccccgc

SEQ ID NO: 45480 - DNA, 24 bp, synthetic construct
  misc_feature 1..24: note = Probe
  source 1..24: mol_type = other DNA
agtggtgagtatccccgcctgtca

SEQ ID NO: 45481 - DNA, 26 bp, synthetic construct
  misc_feature 1..26: note = Probe
  source 1..26: mol_type = other DNA
agtggtgagtatccccgcctgtcacg

SEQ ID NO: 45482 - DNA, 36 bp, synthetic construct; identical to SEQ ID NO: 12765
  misc_feature 1..36: note = Probe
  source 1..36: mol_type = other DNA

SEQ ID NO: 45483 - DNA, 36 bp, synthetic construct; identical to SEQ ID NO: 12768
  misc_feature 1..36: note = Probe
  source 1..36: mol_type = other DNA

SEQ ID NO: 45484 - DNA, 19 bp, synthetic construct
  misc_feature 1..19: note = Probe
  source 1..19: mol_type = other DNA
agtggttaggattcggcgc

SEQ ID NO: 45485 - DNA, 20 bp, synthetic construct
  misc_feature 1..20: note = Probe
  source 1..20: mol_type = other DNA
agtggttaggattcggcgct

SEQ ID NO: 45486 - DNA, 24 bp, synthetic construct
  misc_feature 1..24: note = Probe
  source 1..24: mol_type = other DNA
agtggttaggattcggcgctctca

SEQ ID NO: 45487 - DNA, 18 bp, synthetic construct
  misc_feature 1..18: note = Probe
  source 1..18: mol_type = other DNA
agtggttagtactctgcg

SEQ ID NO: 45488 - DNA, 20 bp, synthetic construct
  misc_feature 1..20: note = Probe
  source 1..20: mol_type = other DNA
agtgtgtcaggatggccgag

SEQ ID NO: 45489 - DNA, 21 bp, synthetic construct
  misc_feature 1..21: note = Probe
  source 1..21: mol_type = other DNA
agtgtgtcaggatggccgagt

SEQ ID NO: 45490 - DNA, 25 bp, synthetic construct
  misc_feature 1..25: note = Probe
  source 1..25: mol_type = other DNA
agtgtttgtgggtttaagtcccatt

SEQ ID NO: 45491 - DNA, 26 bp, synthetic construct
  misc_feature 1..26: note = Probe
  source 1..26: mol_type = other DNA
agtgtttgtgggtttaagtcccattg

SEQ ID NO: 45492 - DNA, 27 bp, synthetic construct
  misc_feature 1..27: note = Probe
  source 1..27: mol_type = other DNA
agtgtttgtgggtttaagtcccattgg

SEQ ID NO: 45493 - DNA, 28 bp, synthetic construct
  misc_feature 1..28: note = Probe
  source 1..28: mol_type = other DNA
agtgtttgtgggtttaagtcccattggt

SEQ ID NO: 45494 - DNA, 32 bp, synthetic construct; identical to SEQ ID NO: 16995
  misc_feature 1..32: note = Probe
  source 1..32: mol_type = other DNA

SEQ ID NO: 45495 - DNA, 33 bp, synthetic construct; identical to SEQ ID NO: 16996
  misc_feature 1..33: note = Probe
  source 1..33: mol_type = other DNA

SEQ ID NO: 45496 - DNA, 34 bp, synthetic construct; identical to SEQ ID NO: 3601
  misc_feature 1..34: note = Probe
  source 1..34: mol_type = other DNA

SEQ ID NO: 45497 - DNA, 23 bp, synthetic construct
  misc_feature 1..23: note = Probe
  source 1..23: mol_type = other DNA
agttaaagactttttctctgatt

SEQ ID NO: 45498 - DNA, 24 bp, synthetic construct
  misc_feature 1..24: note = Probe
  source 1..24: mol_type = other DNA
agttaaagactttttctctgattt

SEQ ID NO: 45499 - DNA, 20 bp, synthetic construct
  misc_feature 1..20: note = Probe
  source 1..20: mol_type = other DNA
agttaaagattaagagaacc

SEQ ID NO: 45500 - DNA, 21 bp, synthetic construct
  misc_feature 1..21: note = Probe
  source 1..21: mol_type = other DNA
agttaaagattaagagaacca

SEQ ID NO: 45501 - DNA, 37 bp, synthetic construct; identical to SEQ ID NO: 3604
  misc_feature 1..37: note = Probe
  source 1..37: mol_type = other DNA

SEQ ID NO: 45502 - DNA, 38 bp, synthetic construct; identical to SEQ ID NO: 3605
  misc_feature 1..38: note = Probe
  source 1..38: mol_type = other DNA

SEQ ID NO: 45503 - DNA, 39 bp, synthetic construct; identical to SEQ ID NO: 3606
  misc_feature 1..39: note = Probe
  source 1..39: mol_type = other DNA

SEQ ID NO: 45504 - DNA, 40 bp, synthetic construct; identical to SEQ ID NO: 3607
  misc_feature 1..40: note = Probe
  source 1..40: mol_type = other DNA

SEQ ID NO: 45505 - DNA, 41 bp, synthetic construct; identical to SEQ ID NO: 3608
  misc_feature 1..41: note = Probe
  source 1..41: mol_type = other DNA

SEQ ID NO: 45506 - DNA, 50 bp, synthetic construct; identical to SEQ ID NO: 3610
  misc_feature 1..50: note = Probe
  source 1..50: mol_type = other DNA

SEQ ID NO: 45507 - DNA, 28 bp, synthetic construct
  misc_feature 1..28: note = Probe
  source 1..28: mol_type = other DNA
agttaaattataggctaaatcctatata

SEQ ID NO: 45508 - DNA, 30 bp, synthetic construct
  misc_feature 1..30: note = Probe
  source 1..30: mol_type = other DNA
agttaaattataggctaaatcctatatatc

SEQ ID NO: 45509 - DNA, 23 bp, synthetic construct
  misc_feature 1..23: note = Probe
  source 1..23: mol_type = other DNA
agttcaaatctcgctggggcctc

SEQ ID NO: 45510 - DNA, 22 bp, synthetic construct
  misc_feature 1..22: note = Probe
  source 1..22: mol_type = other DNA
agttcaaatctcggtggaacct

SEQ ID NO: 45511 - DNA, 23 bp, synthetic construct
  misc_feature 1..23: note = Probe
  source 1..23: mol_type = other DNA
agttcaaatctcggtggaacctg

SEQ ID NO: 45512 - DNA, 23 bp, synthetic construct
  misc_feature 1..23: note = Probe
  source 1..23: mol_type = other DNA
agttcaaatctcggtggaacctt

SEQ ID NO: 45513 - DNA, 25 bp, synthetic construct
  misc_feature 1..25: note = Probe
  source 1..25: mol_type = other DNA
agttcgaacctcagagggggcagct

SEQ ID NO: 45514 - DNA, 22 bp, synthetic construct
  misc_feature 1..22: note = Probe
  source 1..22: mol_type = other DNA
agttcgagcctcacctggagca

SEQ ID NO: 45515 - DNA, 24 bp, synthetic construct
  misc_feature 1..24: note = Probe
  source 1..24: mol_type = other DNA
agttcgagcctcacctggagcatt

SEQ ID NO: 45516 - DNA, 25 bp, synthetic construct
  misc_feature 1..25: note = Probe
  source 1..25: mol_type = other DNA
agttcgagcctcacctggagcattg

SEQ ID NO: 45517 - DNA, 22 bp, synthetic construct
  misc_feature 1..22: note = Probe
  source 1..22: mol_type = other DNA
agttcgatcctcacacggggca

SEQ ID NO: 45518 - DNA, 24 bp, synthetic construct
  misc_feature 1..24: note = Probe
  source 1..24: mol_type = other DNA
agttcgatcctcacacggggcaca

SEQ ID NO: 45519 - DNA, 25 bp, synthetic construct
  misc_feature 1..25: note = Probe
  source 1..25: mol_type = other DNA
agttcgatcctcacacggggcacaa

SEQ ID NO: 45520 - DNA, 25 bp, synthetic construct
  misc_feature 1..25: note = Probe
  source 1..25: mol_type = other DNA
agttgatgcagagtggggttttgca

SEQ ID NO: 45521 - DNA, 27 bp, synthetic construct
  misc_feature 1..27: note = Probe
  source 1..27: mol_type = other DNA
agttgatgcagagtggggttttgcagt

SEQ ID NO: 45522 - DNA, 28 bp, synthetic construct
  misc_feature 1..28: note = Probe
  source 1..28: mol_type = other DNA
agttgatgcagagtggggttttgcagtc

SEQ ID NO: 45523 - DNA, 30 bp, synthetic construct; identical to SEQ ID NO: 12788
  misc_feature 1..30: note = Probe
  source 1..30: mol_type = other DNA

SEQ ID NO: 45524 - DNA, 34 bp, synthetic construct; identical to SEQ ID NO: 17016
  misc_feature 1..34: note = Probe
  source 1..34: mol_type = other DNA

SEQ ID NO: 45525 - DNA, 35 bp, synthetic construct; identical to SEQ ID NO: 3616
  misc_feature 1..35: note = Probe
  source 1..35: mol_type = other DNA

SEQ ID NO: 45526 - DNA, 23 bp, synthetic construct
  misc_feature 1..23: note = Probe
  source 1..23: mol_type = other DNA
agttgattagggtgcttagctgt

SEQ ID NO: 45527 - DNA, 28 bp, synthetic construct
  misc_feature 1..28: note = Probe
  source 1..28: mol_type = other DNA
agttgattagggtgcttagctgttaact

SEQ ID NO: 45528 - DNA, 29 bp, synthetic construct
  misc_feature 1..29: note = Probe
  source 1..29: mol_type = other DNA
agttgattagggtgcttagctgttaacta

SEQ ID NO: 45529 - DNA, 44 bp, synthetic construct; identical to SEQ ID NO: 3617
  misc_feature 1..44: note = Probe
  source 1..44: mol_type = other DNA

SEQ ID NO: 45530 - DNA, 35 bp, synthetic construct; identical to SEQ ID NO: 3620
  misc_feature 1..35: note = Probe
  source 1..35: mol_type = other DNA

SEQ ID NO: 45531 - DNA, 37 bp, synthetic construct; identical to SEQ ID NO: 3621
  misc_feature 1..37: note = Probe
  source 1..37: mol_type = other DNA

SEQ ID NO: 45532 - DNA, 27 bp, synthetic construct
  misc_feature 1..27: note = Probe
  source 1..27: mol_type = other DNA
agttttgacaacattcaaaaaagagta

SEQ ID NO: 45533 - DNA, 29 bp, synthetic construct
  misc_feature 1..29: note = Probe
  source 1..29: mol_type = other DNA
agttttgacaacattcaaaaaagagtaat

SEQ ID NO: 45534 - DNA, 42 bp, synthetic construct; identical to SEQ ID NO: 3622
  misc_feature 1..42: note = Probe
  source 1..42: mol_type = other DNA

SEQ ID NO: 45535 - DNA, 50 bp, synthetic construct
  misc_feature 1..50: note = Probe
  source 1..50: mol_type = other DNA
ataaaagagttactttgatagagtaaataataggagcttaaaccccctta

SEQ ID NO: 45536 - DNA, 30 bp, synthetic construct; identical to SEQ ID NO: 3625
  misc_feature 1..30: note = Probe
  source 1..30: mol_type = other DNA

SEQ ID NO: 45537 - DNA, 19 bp, synthetic construct
  misc_feature 1..19: note = Probe
  source 1..19: mol_type = other DNA
ataacagctatccattggt

SEQ ID NO: 45538 - DNA, 30 bp, synthetic construct; identical to SEQ ID NO: 28324
  misc_feature 1..30: note = Probe
  source 1..30: mol_type = other DNA

SEQ ID NO: 45539 - DNA, 24 bp, synthetic construct
  misc_feature 1..24: note = Probe
  source 1..24: mol_type = other DNA
ataaccatgcacactactataacc

SEQ ID NO: 45540 - DNA, 25 bp, synthetic construct
  misc_feature 1..25: note = Probe
  source 1..25: mol_type = other DNA
ataaccatgcacactactataacca

SEQ ID NO: 45541 - DNA, 26 bp, synthetic construct
  misc_feature 1..26: note = Probe
  source 1..26: mol_type = other DNA
ataaccatgcacactactataaccac

SEQ ID NO: 45542 - DNA, 27 bp, synthetic construct
  misc_feature 1..27: note = Probe
  source 1..27: mol_type = other DNA
ataaccatgcacactactataaccacc

SEQ ID NO: 45543 - DNA, 28 bp, synthetic construct
  misc_feature 1..28: note = Probe
  source 1..28: mol_type = other DNA
ataaccatgcacactactataaccaccc

SEQ ID NO: 45544 - DNA, 29 bp, synthetic construct
  misc_feature 1..29: note = Probe
  source 1..29: mol_type = other DNA
ataaccatgcacactactataaccaccct

SEQ ID NO: 45545 - DNA, 30 bp, synthetic construct; identical to SEQ ID NO: 3631
  misc_feature 1..30: note = Probe
  source 1..30: mol_type = other DNA

SEQ ID NO: 45546 - DNA, 42 bp, synthetic construct; identical to SEQ ID NO: 3634
  misc_feature 1..42: note = Probe
  source 1..42: mol_type = other DNA

SEQ ID NO: 45547 - DNA, 24 bp, synthetic construct
  misc_feature 1..24: note = Probe
  source 1..24: mol_type = other DNA
ataagctatcgggcccataccccg

SEQ ID NO: 45548 - DNA, 25 bp, synthetic construct
  misc_feature 1..25: note = Probe
  source 1..25: mol_type = other DNA
ataagctatcgggcccataccccga

SEQ ID NO: 45549 - DNA, 26 bp, synthetic construct
  misc_feature 1..26: note = Probe
  source 1..26: mol_type = other DNA
ataagctatcgggcccataccccgaa

SEQ ID NO: 45550 - DNA, 27 bp, synthetic construct
  misc_feature 1..27: note = Probe
  source 1..27: mol_type = other DNA
ataagctatcgggcccataccccgaaa

SEQ ID NO: 45551 - DNA, 28 bp, synthetic construct
  misc_feature 1..28: note = Probe
  source 1..28: mol_type = other DNA
ataagctatcgggcccataccccgaaaa

SEQ ID NO: 45552 - DNA, 29 bp, synthetic construct
  misc_feature 1..29: note = Probe
  source 1..29: mol_type = other DNA
ataagctatcgggcccataccccgaaaat

SEQ ID NO: 45553 - DNA, 30 bp, synthetic construct; identical to SEQ ID NO: 3643
  misc_feature 1..30: note = Probe
  source 1..30: mol_type = other DNA

SEQ ID NO: 45554 - DNA, 32 bp, synthetic construct; identical to SEQ ID NO: 3645
  misc_feature 1..32: note = Probe
  source 1..32: mol_type = other DNA

SEQ ID NO: 45555 - DNA, 33 bp, synthetic construct; identical to SEQ ID NO: 3646
  misc_feature 1..33: note = Probe
  source 1..33: mol_type = other DNA

SEQ ID NO: 45556 - DNA, 34 bp, synthetic construct; identical to SEQ ID NO: 3647
  misc_feature 1..34: note = Probe
  source 1..34: mol_type = other DNA

SEQ ID NO: 45557 - DNA, 37 bp, synthetic construct; identical to SEQ ID NO: 3649
  misc_feature 1..37: note = Probe
  source 1..37: mol_type = other DNA

SEQ ID NO: 45558 - DNA, 50 bp, synthetic construct; identical to SEQ ID NO: 3652
  misc_feature 1..50: note = Probe
  source 1..50: mol_type = other DNA

SEQ ID NO: 45559 - DNA, 32 bp, synthetic construct
  misc_feature 1..32: note = Probe
  source 1..32: mol_type = other DNA
ataataggagcttaaacccccttatttctagg

SEQ ID NO: 45560 - DNA, 20 bp, synthetic construct
  misc_feature 1..20: note = Probe
  source 1..20: mol_type = other DNA
ataatcatatttaccaaatg

SEQ ID NO: 45561 - DNA, 31 bp, synthetic construct; identical to SEQ ID NO: 17084
  misc_feature 1..31: note = Probe
  source 1..31: mol_type = other DNA

SEQ ID NO: 45562 - DNA, 42 bp, synthetic construct; identical to SEQ ID NO: 17085
  misc_feature 1..42: note = Probe
  source 1..42: mol_type = other DNA

SEQ ID NO: 45563 - DNA, 50 bp, synthetic construct; identical to SEQ ID NO: 28366
  misc_feature 1..50: note = Probe
  source 1..50: mol_type = other DNA

SEQ ID NO: 45564 - DNA, 50 bp, synthetic construct; identical to SEQ ID NO: 3654
  misc_feature 1..50: note = Probe
  source 1..50: mol_type = other DNA

SEQ ID NO: 45565 - DNA, 46 bp, synthetic construct; identical to SEQ ID NO: 3655
  misc_feature 1..46: note = Probe
  source 1..46: mol_type = other DNA

SEQ ID NO: 45566 - DNA, 50 bp, synthetic construct; identical to SEQ ID NO: 3657
  misc_feature 1..50: note = Probe
  source 1..50: mol_type = other DNA

SEQ ID NO: 45567 - DNA, 29 bp, synthetic construct
  misc_feature 1..29: note = Probe
  source 1..29: mol_type = other DNA
atacccacacccacccaagaacagggttt

SEQ ID NO: 45568 - DNA, 30 bp, synthetic construct; identical to SEQ ID NO: 3660
  misc_feature 1..30: note = Probe
  source 1..30: mol_type = other DNA

SEQ ID NO: 45569 - DNA, 31 bp, synthetic construct; identical to SEQ ID NO: 3661
  misc_feature 1..31: note = Probe
  source 1..31: mol_type = other DNA

SEQ ID NO: 45570 - DNA, 32 bp, synthetic construct; identical to SEQ ID NO: 3662
  misc_feature 1..32: note = Probe
  source 1..32: mol_type = other DNA

SEQ ID NO: 45571 - DNA, 33 bp, synthetic construct; identical to SEQ ID NO: 3663
  misc_feature 1..33: note = Probe
  source 1..33: mol_type = other DNA

SEQ ID NO: 45572 - DNA, 36 bp, synthetic construct; identical to SEQ ID NO: 17096
  misc_feature 1..36: note = Probe
  source 1..36: mol_type = other DNA

SEQ ID NO: 45573 - DNA, 31 bp, synthetic construct
  misc_feature 1..31: note = Probe
  source 1..31: mol_type = other DNA
ataccccgaaaatgttggttatacccttccc

SEQ ID NO: 45574 - DNA, 34 bp, synthetic construct; identical to SEQ ID NO: 3665
  misc_feature 1..34: note = Probe
  source 1..34: mol_type = other DNA

SEQ ID NO: 45575 - DNA, 37 bp, synthetic construct; identical to SEQ ID NO: 12794
  misc_feature 1..37: note = Probe
  source 1..37: mol_type = other DNA

SEQ ID NO: 45576 - DNA, 39 bp, synthetic construct; identical to SEQ ID NO: 3666
  misc_feature 1..39: note = Probe
  source 1..39: mol_type = other DNA

SEQ ID NO: 45577 - DNA, 40 bp, synthetic construct; identical to SEQ ID NO: 3667
  misc_feature 1..40: note = Probe
  source 1..40: mol_type = other DNA

SEQ ID NO: 45578 - DNA, 18 bp, synthetic construct
  misc_feature 1..18: note = Probe
  source 1..18: mol_type = other DNA
atagagtaaataatagga

SEQ ID NO: 45579 - DNA, 19 bp, synthetic construct
  misc_feature 1..19: note = Probe
  source 1..19: mol_type = other DNA
atagagtaaataataggag

SEQ ID NO: 45580 - DNA, 28 bp, synthetic construct
  misc_feature 1..28: note = Probe
  source 1..28: mol_type = other DNA
atagagtaaataataggagcttaaaccc

SEQ ID NO: 45581 - DNA, 29 bp, synthetic construct
  misc_feature 1..29: note = Probe
  source 1..29: mol_type = other DNA
atagagtaaataataggagcttaaacccc

SEQ ID NO: 45582 - DNA, 31 bp, synthetic construct
  misc_feature 1..31: note = Probe
  source 1..31: mol_type = other DNA
atagagtaaataataggagcttaaaccccct

SEQ ID NO: 45583 - DNA, 34 bp, synthetic construct; identical to SEQ ID NO: 369
  misc_feature 1..34: note = Probe
  source 1..34: mol_type = other DNA

SEQ ID NO: 45584 - DNA, 35 bp, synthetic construct
  misc_feature 1..35: note = Probe
  source 1..35: mol_type = other DNA
atagagtaaataataggagcttaaacccccttatt

SEQ ID NO: 45585 - DNA, 37 bp, synthetic construct; identical to SEQ ID NO: 3668
  misc_feature 1..37: note = Probe
  source 1..37: mol_type = other DNA

SEQ ID NO: 45586 - DNA, 38 bp, synthetic construct; identical to SEQ ID NO: 370
  misc_feature 1..38: note = Probe
  source 1..38: mol_type = other DNA

SEQ ID NO: 45587 - DNA, 40 bp, synthetic construct; identical to SEQ ID NO: 3669
  misc_feature 1..40: note = Probe
  source 1..40: mol_type = other DNA

SEQ ID NO: 45588 - DNA, 41 bp, synthetic construct; identical to SEQ ID NO: 3670
  misc_feature 1..41: note = Probe
  source 1..41: mol_type = other DNA

SEQ ID NO: 45589 - DNA, 42 bp, synthetic construct; identical to SEQ ID NO: 3671
  misc_feature 1..42: note = Probe
  source 1..42: mol_type = other DNA

SEQ ID NO: 45590 - DNA, 43 bp, synthetic construct; identical to SEQ ID NO: 3672
  misc_feature 1..43: note = Probe
  source 1..43: mol_type = other DNA

SEQ ID NO: 45591 - DNA, 44 bp, synthetic construct
  misc_feature 1..44: note = Probe
  source 1..44: mol_type = other DNA
atagagtaaataataggagcttaaacccccttatttctaggact

SEQ ID NO: 45592 - DNA, 27 bp, synthetic construct
  misc_feature 1..27: note = Probe
  source 1..27: mol_type = other DNA
atagctcagtcggtagagcatcagact

SEQ ID NO: 45593 - DNA, 30 bp, synthetic construct; identical to SEQ ID NO: 12797
  misc_feature 1..30: note = Probe
  source 1..30: mol_type = other DNA

SEQ ID NO: 45594 - DNA, 17 bp, synthetic construct
  misc_feature 1..17: note = Probe
  source 1..17: mol_type = other DNA
ataggagcttaaacccc

SEQ ID NO: 45595 - DNA, 18 bp, synthetic construct
  misc_feature 1..18: note = Probe
  source 1..18: mol_type = other DNA
ataggagcttaaaccccc

SEQ ID NO: 45596 - DNA, 27 bp, synthetic construct
  misc_feature 1..27: note = Probe
  source 1..27: mol_type = other DNA
ataggctaaatcctatatatcttaatg

SEQ ID NO: 45597 - DNA, 16 bp, synthetic construct
  misc_feature 1..16: note = Probe
  source 1..16: mol_type = other DNA
ataggtggcacggaga

SEQ ID NO: 45598 - DNA, 17 bp, synthetic construct
  misc_feature 1..17: note = Probe
  source 1..17: mol_type = other DNA
ataggtggcacggagaa

SEQ ID NO: 45599 - DNA, 17 bp, synthetic construct
  misc_feature 1..17: note = Probe
  source 1..17: mol_type = other DNA
ataggtttggtcctagc

SEQ ID NO: 45600 - DNA, 18 bp, synthetic construct
  misc_feature 1..18: note = Probe
  source 1..18: mol_type = other DNA
ataggtttggtcctagcc

SEQ ID NO: 45601 - DNA, 19 bp, synthetic construct
  misc_feature 1..19: note = Probe
  source 1..19: mol_type = other DNA
ataggtttggtcctagcct

SEQ ID NO: 45602 - DNA, 20 bp, synthetic construct
  misc_feature 1..20: note = Probe
  source 1..20: mol_type = other DNA
ataggtttggtcctagcctt

SEQ ID NO: 45603 - DNA, 22 bp, synthetic construct
  misc_feature 1..22: note = Probe
  source 1..22: mol_type = other DNA
ataggtttggtcctagcctttc

SEQ ID NO: 45604 - DNA, 23 bp, synthetic construct
  misc_feature 1..23: note = Probe
  source 1..23: mol_type = other DNA
ataggtttggtcctagcctttct

SEQ ID NO: 45605 - DNA, 24 bp, synthetic construct
  misc_feature 1..24: note = Probe
  source 1..24: mol_type = other DNA
ataggtttggtcctagcctttcta

SEQ ID NO: 45606 - DNA, 26 bp, synthetic construct
  misc_feature 1..26: note = Probe
  source 1..26: mol_type = other DNA
ataggtttggtcctagcctttctatt

SEQ ID NO: 45607 - DNA, 27 bp, synthetic construct
  misc_feature 1..27: note = Probe
  source 1..27: mol_type = other DNA
ataggtttggtcctagcctttctatta

SEQ ID NO: 45608 - DNA, 29 bp, synthetic construct
  misc_feature 1..29: note = Probe
  source 1..29: mol_type = other DNA
ataggtttggtcctagcctttctattagc

SEQ ID NO: 45609 - DNA, 50 bp, synthetic construct; identical to SEQ ID NO: 3687
  misc_feature 1..50: note = Probe
  source 1..50: mol_type = other DNA

SEQ ID NO: 45610 - DNA, 23 bp, synthetic construct
  misc_feature 1..23: note = Probe
  source 1..23: mol_type = other DNA
atatcattggtcgtggttgtagt

SEQ ID NO: 45611 - DNA, 25 bp, synthetic construct
  misc_feature 1..25: note = Probe
  source 1..25: mol_type = other DNA
atatcattggtcgtggttgtagtcc

SEQ ID NO: 45612 - DNA, 31 bp, synthetic construct; identical to SEQ ID NO: 25026
  misc_feature 1..31: note = Probe
  source 1..31: mol_type = other DNA

SEQ ID NO: 45613 - DNA, 35 bp, synthetic construct; identical to SEQ ID NO: 12801
  misc_feature 1..35: note = Probe
  source 1..35: mol_type = other DNA

SEQ ID NO: 45614 - DNA, 36 bp, synthetic construct; identical to SEQ ID NO: 372
  misc_feature 1..36: note = Probe
  source 1..36: mol_type = other DNA

SEQ ID NO: 45615 - DNA, 37 bp, synthetic construct; identical to SEQ ID NO: 17141
  misc_feature 1..37: note = Probe
  source 1..37: mol_type = other DNA

SEQ ID NO: 45616 - DNA, 38 bp, synthetic construct; identical to SEQ ID NO: 17142
  misc_feature 1..38: note = Probe
  source 1..38: mol_type = other DNA

SEQ ID NO: 45617 - DNA, 39 bp, synthetic construct; identical to SEQ ID NO: 3695
  misc_feature 1..39: note = Probe
  source 1..39: mol_type = other DNA

SEQ ID NO: 45618 - DNA, 23 bp, synthetic construct
  misc_feature 1..23: note = Probe
  source 1..23: mol_type = other DNA
atatccaaccttcagctataggg

SEQ ID NO: 45619 - DNA, 29 bp, synthetic construct
  misc_feature 1..29: note = Probe
  source 1..29: mol_type = other DNA
atatccaaccttcagctatagggtggaga

SEQ ID NO: 45620 - DNA, 50 bp, synthetic construct; identical to SEQ ID NO: 3698
  misc_feature 1..50: note = Probe
  source 1..50: mol_type = other DNA

SEQ ID NO: 45621 - DNA, 18 bp, synthetic construct
  misc_feature 1..18: note = Probe
  source 1..18: mol_type = other DNA
atcaccccataaacaaat

SEQ ID NO: 45622 - DNA, 50 bp, synthetic construct
  misc_feature 1..50: note = Probe
  source 1..50: mol_type = other DNA
atcacgtctgctttacacgcagaaggtcctgggttcgagccccagtggaa

SEQ ID NO: 45623 - DNA, 32 bp, synthetic construct
  misc_feature 1..32: note = Probe
  source 1..32: mol_type = other DNA
atcacgttcgcctaacacgcgaaaggtccccg

SEQ ID NO: 45624 - DNA, 50 bp, synthetic construct
  misc_feature 1..50: note = Probe
  source 1..50: mol_type = other DNA
atcacgttcgcctaacacgcgaaaggtccccggttcgaaaccgggcggaa

SEQ ID NO: 45625 - DNA, 25 bp, synthetic construct
  misc_feature 1..25: note = Probe
  source 1..25: mol_type = other DNA
atcacgttcgcctcacacgcgaaag

SEQ ID NO: 45626 - DNA, 32 bp, synthetic construct
  misc_feature 1..32: note = Probe
  source 1..32: mol_type = other DNA
atcacgttcgcctcacacgcgaaaggtccccg

SEQ ID NO: 45627 - DNA, 44 bp, synthetic construct
  misc_feature 1..44: note = Probe
  source 1..44: mol_type = other DNA
atcacgttcgcctcacacgcgaaaggtccccggttcgaaaccgg

SEQ ID NO: 45628 - DNA, 50 bp, synthetic construct
  misc_feature 1..50: note = Probe
  source 1..50: mol_type = other DNA
atcacgttcgcctcacacgcgaaaggtccccggttcgaaaccgggcggaa

SEQ ID NO: 45629 - DNA, 34 bp, synthetic construct; identical to SEQ ID NO: 374
  misc_feature 1..34: note = Probe
  source 1..34: mol_type = other DNA

SEQ ID NO: 45630 - DNA, 36 bp, synthetic construct; identical to SEQ ID NO: 17155
  misc_feature 1..36: note = Probe
  source 1..36: mol_type = other DNA

SEQ ID NO: 45631 - DNA, 34 bp, synthetic construct; identical to SEQ ID NO: 375
  misc_feature 1..34: note = Probe
  source 1..34: mol_type = other DNA

SEQ ID NO: 45632 - DNA, 36 bp, synthetic construct; identical to SEQ ID NO: 17166
  misc_feature 1..36: note = Probe
  source 1..36: mol_type = other DNA

SEQ ID NO: 45633 - DNA, 50 bp, synthetic construct; identical to SEQ ID NO: 3714
  misc_feature 1..50: note = Probe
  source 1..50: mol_type = other DNA

SEQ ID NO: 45634 - DNA, 50 bp, synthetic construct; identical to SEQ ID NO: 3715
  misc_feature 1..50: note = Probe
  source 1..50: mol_type = other DNA

SEQ ID NO: 45635 - DNA, 20 bp, synthetic construct
  misc_feature 1..20: note = Probe
  source 1..20: mol_type = other DNA
atcattggtcgtggttgtag

SEQ ID NO: 45636 - DNA, 28 bp, synthetic construct
  misc_feature 1..28: note = Probe
  source 1..28: mol_type = other DNA
atcattggtcgtggttgtagtccgtgcg

SEQ ID NO: 45637 - DNA, 31 bp, synthetic construct; identical to SEQ ID NO: 17185
  misc_feature 1..31: note = Probe
  source 1..31: mol_type = other DNA

SEQ ID NO: 45638 - DNA, 36 bp, synthetic construct; identical to SEQ ID NO: 17195
  misc_feature 1..36: note = Probe
  source 1..36: mol_type = other DNA

SEQ ID NO: 45639 - DNA, 37 bp, synthetic construct; identical to SEQ ID NO: 3722
  misc_feature 1..37: note = Probe
  source 1..37: mol_type = other DNA

SEQ ID NO: 45640 - DNA, 38 bp, synthetic construct; identical to SEQ ID NO: 3723
  misc_feature 1..38: note = Probe
  source 1..38: mol_type = other DNA

SEQ ID NO: 45641 - DNA, 36 bp, synthetic construct; identical to SEQ ID NO: 17198
  misc_feature 1..36: note = Probe
  source 1..36: mol_type = other DNA

SEQ ID NO: 45642 - DNA, 34 bp, synthetic construct; identical to SEQ ID NO: 17199
  misc_feature 1..34: note = Probe
  source 1..34: mol_type = other DNA

SEQ ID NO: 45643 - DNA, 36 bp, synthetic construct; identical to SEQ ID NO: 17201
  misc_feature 1..36: note = Probe
  source 1..36: mol_type = other DNA

SEQ ID NO: 45644 - DNA, 38 bp, synthetic construct; identical to SEQ ID NO: 3724
  misc_feature 1..38: note = Probe
  source 1..38: mol_type = other DNA

SEQ ID NO: 45645 - DNA, 18 bp, synthetic construct
  misc_feature 1..18: note = Probe
  source 1..18: mol_type = other DNA
atccaggtgccccctccc

SEQ ID NO: 45646 - DNA, 23 bp, synthetic construct
  misc_feature 1..23: note = Probe
  source 1..23: mol_type = other DNA
atccattggggtttccccgcgca

SEQ ID NO: 45647 - DNA, 26 bp, synthetic construct
  misc_feature 1..26: note = Probe
  source 1..26: mol_type = other DNA
atccattggtcttaggccccaaaaat

SEQ ID NO: 45648 - DNA, 45 bp, synthetic construct; identical to SEQ ID NO: 3727
  misc_feature 1..45: note = Probe
  source 1..45: mol_type = other DNA

SEQ ID NO: 45649 - DNA, 49 bp, synthetic construct; identical to SEQ ID NO: 3728
  misc_feature 1..49: note = Probe
  source 1..49: mol_type = other DNA

SEQ ID NO: 45650 - DNA, 50 bp, synthetic construct; identical to SEQ ID NO: 28512
  misc_feature 1..50: note = Probe
  source 1..50: mol_type = other DNA

SEQ ID NO: 45651 - DNA, 18 bp, synthetic construct
  misc_feature 1..18: note = Probe
  source 1..18: mol_type = other DNA
atcccaccgctgccaagt

SEQ ID NO: 45652 - DNA, 21 bp, synthetic construct
  misc_feature 1..21: note = Probe
  source 1..21: mol_type = other DNA
atcccaccgctgccaagtact

SEQ ID NO: 45653 - DNA, 17 bp, synthetic construct
  misc_feature 1..17: note = Probe
  source 1..17: mol_type = other DNA
atcccaccgctgccaca

SEQ ID NO: 45654 - DNA, 18 bp, synthetic construct
  misc_feature 1..18: note = Probe
  source 1..18: mol_type = other DNA
atcccaccgctgccacac

SEQ ID NO: 45655 - DNA, 19 bp, synthetic construct
  misc_feature 1..19: note = Probe
  source 1..19: mol_type = other DNA
atcccaccgctgccacacc

SEQ ID NO: 45656 - DNA, 20 bp, synthetic construct
  misc_feature 1..20: note = Probe
  source 1..20: mol_type = other DNA
atcccaccgctgccacacct

SEQ ID NO: 45657 - DNA, 21 bp, synthetic construct
  misc_feature 1..21: note = Probe
  source 1..21: mol_type = other DNA
atcccaccgctgccacacctc

SEQ ID NO: 45658 - DNA, 22 bp, synthetic construct
  misc_feature 1..22: note = Probe
  source 1..22: mol_type = other DNA
atcccaccgctgccacacctca

SEQ ID NO: 45659 - DNA, 18 bp, synthetic construct
  misc_feature 1..18: note = Probe
  source 1..18: mol_type = other DNA
atcccaccgctgccaggt

SEQ ID NO: 45660 - DNA, 20 bp, synthetic construct
  misc_feature 1..20: note = Probe
  source 1..20: mol_type = other DNA
atcccaccgctgccaggtgc

SEQ ID NO: 45661 - DNA, 23 bp, synthetic construct
  misc_feature 1..23: note = Probe
  source 1..23: mol_type = other DNA
atcccaccgctgccaggtgcttc

SEQ ID NO: 45662 - DNA, 24 bp, synthetic construct
  misc_feature 1..24: note = Probe
  source 1..24: mol_type = other DNA
atcccaccgctgccaggtgcttcc

SEQ ID NO: 45663 - DNA, 20 bp, synthetic construct
  misc_feature 1..20: note = Probe
  source 1..20: mol_type = other DNA
atcccaccgctgccaggttt

SEQ ID NO: 45664 - DNA, 21 bp, synthetic construct
  misc_feature 1..21: note = Probe
  source 1..21: mol_type = other DNA
atcccaccgctgccaggttta

SEQ ID NO: 45665 - DNA, 22 bp, synthetic construct
  misc_feature 1..22: note = Probe
  source 1..22: mol_type = other DNA
atcccaccgctgccaggtttat

SEQ ID NO: 45666 - DNA, 18 bp, synthetic construct
  misc_feature 1..18: note = Probe
  source 1..18: mol_type = other DNA
atcccactcctgacaagc

SEQ ID NO: 45667 - DNA, 18 bp, synthetic construct
  misc_feature 1..18: note = Probe
  source 1..18: mol_type = other DNA
atcccagcggtgcctccg

SEQ ID NO: 45668 - DNA, 34 bp, synthetic construct; identical to SEQ ID NO: 17246
  misc_feature 1..34: note = Probe
  source 1..34: mol_type = other DNA

SEQ ID NO: 45669 - DNA, 17 bp, synthetic construct
  misc_feature 1..17: note = Probe
  source 1..17: mol_type = other DNA
atcccatcctcgtcgct

SEQ ID NO: 45670 - DNA, 20 bp, synthetic construct
  misc_feature 1..20: note = Probe
  source 1..20: mol_type = other DNA
atcccatcctcgtcgctcgg

SEQ ID NO: 45671 - DNA, 18 bp, synthetic construct
  misc_feature 1..18: note = Probe
  source 1..18: mol_type = other DNA
atccccggcacctccacc

SEQ ID NO: 45672 - DNA, 18 bp, synthetic construct
  misc_feature 1..18: note = Probe
  source 1..18: mol_type = other DNA
atccccggcatctccaaa

SEQ ID NO: 45673 - DNA, 18 bp, synthetic construct
  misc_feature 1..18: note = Probe
  source 1..18: mol_type = other DNA
atccccggcatctccatt

SEQ ID NO: 45674 - DNA, 19 bp, synthetic construct
  misc_feature 1..19: note = Probe
  source 1..19: mol_type = other DNA
atccccggcatctccattg

SEQ ID NO: 45675 - DNA, 16 bp, synthetic construct
  misc_feature 1..16: note = Probe
  source 1..16: mol_type = other DNA
atcccggacgagcccc

SEQ ID NO: 45676 - DNA, 17 bp, synthetic construct
  misc_feature 1..17: note = Probe
  source 1..17: mol_type = other DNA
atcccggacgagccccc

SEQ ID NO: 45677 - DNA, 18 bp, synthetic construct
  misc_feature 1..18: note = Probe
  source 1..18: mol_type = other DNA
atcccggacgagccccct

SEQ ID NO: 45678 - DNA, 20 bp, synthetic construct
  misc_feature 1..20: note = Probe
  source 1..20: mol_type = other DNA
atcccggacgagcccccttt

SEQ ID NO: 45679 - DNA, 17 bp, synthetic construct
  misc_feature 1..17: note = Probe
  source 1..17: mol_type = other DNA
atcccggacgagcccct

SEQ ID NO: 45680 - DNA, 17 bp, synthetic construct
  misc_feature 1..17: note = Probe
  source 1..17: mol_type = other DNA
atccggctcgaaggacg

SEQ ID NO: 45681 - DNA, 18 bp, synthetic construct
  misc_feature 1..18: note = Probe
  source 1..18: mol_type = other DNA
atccggctcgaaggacga

SEQ ID NO: 45682 - DNA, 16 bp, synthetic construct
  misc_feature 1..16: note = Probe
  source 1..16: mol_type = other DNA
atccgggtgccccctc

SEQ ID NO: 45683 - DNA, 17 bp, synthetic construct
  misc_feature 1..17: note = Probe
  source 1..17: mol_type = other DNA
atccgggtgccccctca

SEQ ID NO: 45684 - DNA, 18 bp, synthetic construct
  misc_feature 1..18: note = Probe
  source 1..18: mol_type = other DNA
atccgggtgccccctcaa

SEQ ID NO: 45685 - DNA, 19 bp, synthetic construct
  misc_feature 1..19: note = Probe
  source 1..19: mol_type = other DNA
atccgggtgccccctcaat

SEQ ID NO: 45686 - DNA, 20 bp, synthetic construct
  misc_feature 1..20: note = Probe
  source 1..20: mol_type = other DNA
atccgggtgccccctcaatg

SEQ ID NO: 45687 - DNA, 21 bp, synthetic construct
  misc_feature 1..21: note = Probe
  source 1..21: mol_type = other DNA
atccgggtgccccctcaatgg

SEQ ID NO: 45688 - DNA, 22 bp, synthetic construct
  misc_feature 1..22: note = Probe
  source 1..22: mol_type = other DNA
atccgggtgccccctcaatggc

SEQ ID NO: 45689 - DNA, 18 bp, synthetic construct
  misc_feature 1..18: note = Probe
  source 1..18: mol_type = other DNA
atccgggtgccccctcac

SEQ ID NO: 45690 - DNA, 20 bp, synthetic construct
  misc_feature 1..20: note = Probe
  source 1..20: mol_type = other DNA
atccgggtgccccctcacag

SEQ ID NO: 45691 - DNA, 17 bp, synthetic construct
  misc_feature 1..17: note = Probe
  source 1..17: mol_type = other DNA
atccgggtgccccctcg

SEQ ID NO: 45692 - DNA, 17 bp, synthetic construct
  misc_feature 1..17: note = Probe
  source 1..17: mol_type = other DNA
atccgggtgccccctct

SEQ ID NO: 45693 - DNA, 18 bp, synthetic construct
  misc_feature 1..18: note = Probe
  source 1..18: mol_type = other DNA
atccgggtgccccctctg

SEQ ID NO: 45694 - DNA, 19 bp, synthetic construct
  misc_feature 1..19: note = Probe
  source 1..19: mol_type = other DNA
atccgggtgccccctctgt

SEQ ID NO: 45695 - DNA, 20 bp, synthetic construct
  misc_feature 1..20: note = Probe
  source 1..20: mol_type = other DNA
atccgggtgccccctctgtg

SEQ ID NO: 45696 - DNA, 21 bp, synthetic construct
  misc_feature 1..21: note = Probe
  source 1..21: mol_type = other DNA
atccgggtgccccctctgtgc

SEQ ID NO: 45697 - DNA, 19 bp, synthetic construct
  misc_feature 1..19: note = Probe
  source 1..19: mol_type = other DNA
atcctcacacggggcacaa

SEQ ID NO: 45698 - DNA, 31 bp, synthetic construct; identical to SEQ ID NO: 17303
  misc_feature 1..31: note = Probe
  source 1..31: mol_type = other DNA

SEQ ID NO: 45699 - DNA, 50 bp, synthetic construct; identical to SEQ ID NO: 17308
  misc_feature 1..50: note = Probe
  source 1..50: mol_type = other DNA

SEQ ID NO: 45700 - DNA, 50 bp, synthetic construct; identical to SEQ ID NO: 38575
  misc_feature 1..50: note = Probe
  source 1..50: mol_type = other DNA

SEQ ID NO: 45701 - DNA, 23 bp, synthetic construct
  misc_feature 1..23: note = Probe
  source 1..23: mol_type = other DNA
atcgaaaccatcctctgctaggt

SEQ ID NO: 45702 - DNA, 22 bp, synthetic construct
  misc_feature 1..22: note = Probe
  source 1..22: mol_type = other DNA
atcgaaaccatcctctgctatc

SEQ ID NO: 45703 - DNA, 23 bp, synthetic construct
  misc_feature 1..23: note = Probe
  source 1..23: mol_type = other DNA
atcgatgcccgcatcctccactc

SEQ ID NO: 45704 - DNA, 23 bp, synthetic construct
  misc_feature 1..23: note = Probe
  source 1..23: mol_type = other DNA
atcgatgcccgcattctccatac

SEQ ID NO: 45705 - DNA, 20 bp, synthetic construct
  misc_feature 1..20: note = Probe
  source 1..20: mol_type = other DNA
atcgcataaaacttaaaact

SEQ ID NO: 45706 - DNA, 25 bp, synthetic construct
  misc_feature 1..25: note = Probe
  source 1..25: mol_type = other DNA
atcgcataaaacttaaaactttaca

SEQ ID NO: 45707 - DNA, 32 bp, synthetic construct
  misc_feature 1..32: note = Probe
  source 1..32: mol_type = other DNA
atcgcataaaacttaaaactttacagtcagag

SEQ ID NO: 45708 - DNA, 37 bp, synthetic construct
  misc_feature 1..37: note = Probe
  source 1..37: mol_type = other DNA
atcgcataaaacttaaaactttacagtcagaggttca

SEQ ID NO: 45709 - DNA, 49 bp, synthetic construct; identical to SEQ ID NO: 3758
  misc_feature 1..49: note = Probe
  source 1..49: mol_type = other DNA

SEQ ID NO: 45710 - DNA, 50 bp, synthetic construct; identical to SEQ ID NO: 3759
  misc_feature 1..50: note = Probe
  source 1..50: mol_type = other DNA

SEQ ID NO: 45711 - DNA, 24 bp, synthetic construct
  misc_feature 1..24: note = Probe
  source 1..24: mol_type = other DNA
atcggtgcatgggtggttcagtgg

SEQ ID NO: 45712 - DNA, 26 bp, synthetic construct
  misc_feature 1..26: note = Probe
  source 1..26: mol_type = other DNA
atcggtgcatgggtggttcagtggta

SEQ ID NO: 45713 - DNA, 28 bp, synthetic construct
  misc_feature 1..28: note = Probe
  source 1..28: mol_type = other DNA
atcggtgcatgggtggttcagtggtaga

SEQ ID NO: 45714 - DNA, 35 bp, synthetic construct; identical to SEQ ID NO: 17338
  misc_feature 1..35: note = Probe
  source 1..35: mol_type = other DNA

SEQ ID NO: 45715 - DNA, 50 bp, synthetic construct; identical to SEQ ID NO: 38591
  misc_feature 1..50: note = Probe
  source 1..50: mol_type = other DNA

SEQ ID NO: 45716 - DNA, 29 bp, synthetic construct
  misc_feature 1..29: note = Probe
  source 1..29: mol_type = other DNA
atcgtatagtggttagtactctgcgttgt

SEQ ID NO: 45717 - DNA, 27 bp, synthetic construct
  misc_feature 1..27: note = Probe
  source 1..27: mol_type = other DNA
atctaaagacaggggttaggcctcttt

SEQ ID NO: 45718 - DNA, 28 bp, synthetic construct
  misc_feature 1..28: note = Probe
  source 1..28: mol_type = other DNA
atctaaagacaggggttaggcctctttt

SEQ ID NO: 45719 - DNA, 34 bp, synthetic construct; identical to SEQ ID NO: 17345
  misc_feature 1..34: note = Probe
  source 1..34: mol_type = other DNA

SEQ ID NO: 45720 - DNA, 35 bp, synthetic construct; identical to SEQ ID NO: 3765
  misc_feature 1..35: note = Probe
  source 1..35: mol_type = other DNA

SEQ ID NO: 45721 - DNA, 36 bp, synthetic construct; identical to SEQ ID NO: 3766
  misc_feature 1..36: note = Probe
  source 1..36: mol_type = other DNA

SEQ ID NO: 45722 - DNA, 38 bp, synthetic construct; identical to SEQ ID NO: 17349
  misc_feature 1..38: note = Probe
  source 1..38: mol_type = other DNA

SEQ ID NO: 45723 - DNA, 36 bp, synthetic construct
  misc_feature 1..36: note = Probe
  source 1..36: mol_type = other DNA
atctaaaggtccctggttcaatcccgggtttcggca

SEQ ID NO: 45724 - DNA, 38 bp, synthetic construct
  misc_feature 1..38: note = Probe
  source 1..38: mol_type = other DNA
atctaaaggtccctggttcaatcccgggtttcggcagc

SEQ ID NO: 45725 - DNA, 39 bp, synthetic construct; identical to SEQ ID NO: 3770
  misc_feature 1..39: note = Probe
  source 1..39: mol_type = other DNA

SEQ ID NO: 45726 - DNA, 20 bp, synthetic construct
  misc_feature 1..20: note = Probe
  source 1..20: mol_type = other DNA
atctaaaggtccctggttcg

SEQ ID NO: 45727 - DNA, 21 bp, synthetic construct
  misc_feature 1..21: note = Probe
  source 1..21: mol_type = other DNA
atctaaaggtccctggttcga

SEQ ID NO: 45728 - DNA, 23 bp, synthetic construct
  misc_feature 1..23: note = Probe
  source 1..23: mol_type = other DNA
atctaaaggtccctggttcgatc

SEQ ID NO: 45729 - DNA, 35 bp, synthetic construct
  misc_feature 1..35: note = Probe
  source 1..35: mol_type = other DNA
atctaaaggtccctggttcgatcccgggtttcggc

SEQ ID NO: 45730 - DNA, 38 bp, synthetic construct; identical to SEQ ID NO: 3773
  misc_feature 1..38: note = Probe
  source 1..38: mol_type = other DNA

SEQ ID NO: 45731 - DNA, 39 bp, synthetic construct; identical to SEQ ID NO: 3774
  misc_feature 1..39: note = Probe
  source 1..39: mol_type = other DNA

SEQ ID NO: 45732 - DNA, 39 bp, synthetic construct; identical to SEQ ID NO: 3775
  misc_feature 1..39: note = Probe
  source 1..39: mol_type = other DNA

SEQ ID NO: 45733 - DNA, 39 bp, synthetic construct; identical to SEQ ID NO: 3776
  misc_feature 1..39: note = Probe
  source 1..39: mol_type = other DNA

SEQ ID NO: 45734 - DNA, 39 bp, synthetic construct; identical to SEQ ID NO: 3777
  misc_feature 1..39: note = Probe
  source 1..39: mol_type = other DNA

SEQ ID NO: 45735 - DNA, 39 bp, synthetic construct; identical to SEQ ID NO: 3780
  misc_feature 1..39: note = Probe
  source 1..39: mol_type = other DNA

SEQ ID NO: 45736 - DNA, 36 bp, synthetic construct; identical to SEQ ID NO: 28719
  misc_feature 1..36: note = Probe
  source 1..36: mol_type = other DNA

SEQ ID NO: 45737 - DNA, 39 bp, synthetic construct; identical to SEQ ID NO: 3783
  misc_feature 1..39: note = Probe
  source 1..39: mol_type = other DNA

SEQ ID NO: 45738 - DNA, 35 bp, synthetic construct; identical to SEQ ID NO: 399
  misc_feature 1..35: note = Probe
  source 1..35: mol_type = other DNA

SEQ ID NO: 45739 - DNA, 36 bp, synthetic construct; identical to SEQ ID NO: 3790
  misc_feature 1..36: note = Probe
  source 1..36: mol_type = other DNA

SEQ ID NO: 45740 - DNA, 38 bp, synthetic construct; identical to SEQ ID NO: 3792
  misc_feature 1..38: note = Probe
  source 1..38: mol_type = other DNA

SEQ ID NO: 45741 - DNA, 34 bp, synthetic construct; identical to SEQ ID NO: 17371
  misc_feature 1..34: note = Probe
  source 1..34: mol_type = other DNA

SEQ ID NO: 45742 - DNA, 36 bp, synthetic construct; identical to SEQ ID NO: 25049
  misc_feature 1..36: note = Probe
  source 1..36: mol_type = other DNA

SEQ ID NO: 45743 - DNA, 39 bp, synthetic construct; identical to SEQ ID NO: 3794
  misc_feature 1..39: note = Probe
  source 1..39: mol_type = other DNA

SEQ ID NO: 45744 - DNA, 49 bp, synthetic construct; identical to SEQ ID NO: 3796
  misc_feature 1..49: note = Probe
  source 1..49: mol_type = other DNA

SEQ ID NO: 45745 - DNA, 50 bp, synthetic construct; identical to SEQ ID NO: 3797
  misc_feature 1..50: note = Probe
  source 1..50: mol_type = other DNA

SEQ ID NO: 45746 - DNA, 25 bp, synthetic construct
  misc_feature 1..25: note = Probe
  source 1..25: mol_type = other DNA
atgaaaacctttttccaaggacaaa

SEQ ID NO: 45747 - DNA, 26 bp, synthetic construct
  misc_feature 1..26: note = Probe
  source 1..26: mol_type = other DNA
atgaaaacctttttccaaggacaaat

SEQ ID NO: 45748 - DNA, 36 bp, synthetic construct; identical to SEQ ID NO: 17382
  misc_feature 1..36: note = Probe
  source 1..36: mol_type = other DNA

SEQ ID NO: 45749 - DNA, 23 bp, synthetic construct
  misc_feature 1..23: note = Probe
  source 1..23: mol_type = other DNA
atgataatcatatttaccaaatg

SEQ ID NO: 45750 - DNA, 30 bp, synthetic construct; identical to SEQ ID NO: 17384
  misc_feature 1..30: note = Probe
  source 1..30: mol_type = other DNA

SEQ ID NO: 45751 - DNA, 44 bp, synthetic construct; identical to SEQ ID NO: 3805
  misc_feature 1..44: note = Probe
  source 1..44: mol_type = other DNA

SEQ ID NO: 45752 - DNA, 24 bp, synthetic construct
  misc_feature 1..24: note = Probe
  source 1..24: mol_type = other DNA
atgcacactactataaccacccta

SEQ ID NO: 45753 - DNA, 18 bp, synthetic construct
  misc_feature 1..18: note = Probe
  source 1..18: mol_type = other DNA
atgcagagtggggttttg

SEQ ID NO: 45754 - DNA, 20 bp, synthetic construct
  misc_feature 1..20: note = Probe
  source 1..20: mol_type = other DNA
atgcagagtggggttttgca

SEQ ID NO: 45755 - DNA, 23 bp, synthetic construct
  misc_feature 1..23: note = Probe
  source 1..23: mol_type = other DNA
atgcagagtggggttttgcagtc

SEQ ID NO: 45756 - DNA, 28 bp, synthetic construct
  misc_feature 1..28: note = Probe
  source 1..28: mol_type = other DNA
atgcagagtggggttttgcagtccttag

SEQ ID NO: 45757 - DNA, 30 bp, synthetic construct; identical to SEQ ID NO: 3807
  misc_feature 1..30: note = Probe
  source 1..30: mol_type = other DNA

SEQ ID NO: 45758 - DNA, 19 bp, synthetic construct
  misc_feature 1..19: note = Probe
  source 1..19: mol_type = other DNA
atgccccaactaaatacta

SEQ ID NO: 45759 - DNA, 21 bp, synthetic construct
  misc_feature 1..21: note = Probe
  source 1..21: mol_type = other DNA
atgccccaactaaatactacc

SEQ ID NO: 45760 - DNA, 22 bp, synthetic construct
  misc_feature 1..22: note = Probe
  source 1..22: mol_type = other DNA
atgccccaactaaatactaccg

SEQ ID NO: 45761 - DNA, 23 bp, synthetic construct
  misc_feature 1..23: note = Probe
  source 1..23: mol_type = other DNA
atgccccaactaaatactaccgt

SEQ ID NO: 45762 - DNA, 24 bp, synthetic construct
  misc_feature 1..24: note = Probe
  source 1..24: mol_type = other DNA
atgccccaactaaatactaccgta

SEQ ID NO: 45763 - DNA, 26 bp, synthetic construct
  misc_feature 1..26: note = Probe
  source 1..26: mol_type = other DNA
atgccccaactaaatactaccgtatg

SEQ ID NO: 45764 - DNA, 28 bp, synthetic construct
  misc_feature 1..28: note = Probe
  source 1..28: mol_type = other DNA
atgccccaactaaatactaccgtatggc

SEQ ID NO: 45765 - DNA, 18 bp, synthetic construct
  misc_feature 1..18: note = Probe
  source 1..18: mol_type = other DNA
atgcccccatgtctaaca

SEQ ID NO: 45766 - DNA, 19 bp, synthetic construct
  misc_feature 1..19: note = Probe
  source 1..19: mol_type = other DNA
atgcccccatgtctaacaa

SEQ ID NO: 45767 - DNA, 21 bp, synthetic construct
  misc_feature 1..21: note = Probe
  source 1..21: mol_type = other DNA
atgcccccatgtctaacaaca

SEQ ID NO: 45768 - DNA, 26 bp, synthetic construct
  misc_feature 1..26: note = Probe
  source 1..26: mol_type = other DNA
atgcccccatgtctaacaacatggct

SEQ ID NO: 45769 - DNA, 27 bp, synthetic construct
  misc_feature 1..27: note = Probe
  source 1..27: mol_type = other DNA
atgcccccatgtctaacaacatggctt

SEQ ID NO: 45770 - DNA, 28 bp, synthetic construct
  misc_feature 1..28: note = Probe
  source 1..28: mol_type = other DNA
atgcccccatgtctaacaacatggcttt

SEQ ID NO: 45771 - DNA, 29 bp, synthetic construct
  misc_feature 1..29: note = Probe
  source 1..29: mol_type = other DNA
atgcccccatgtctaacaacatggctttc

SEQ ID NO: 45772 - DNA, 30 bp, synthetic construct; identical to SEQ ID NO: 3818
  misc_feature 1..30: note = Probe
  source 1..30: mol_type = other DNA

SEQ ID NO: 45773 - DNA, 31 bp, synthetic construct; identical to SEQ ID NO: 3819
  misc_feature 1..31: note = Probe
  source 1..31: mol_type = other DNA

SEQ ID NO: 45774 - DNA, 32 bp, synthetic construct; identical to SEQ ID NO: 3820
  misc_feature 1..32: note = Probe
  source 1..32: mol_type = other DNA

SEQ ID NO: 45775 - DNA, 33 bp, synthetic construct; identical to SEQ ID NO: 3821
  misc_feature 1..33: note = Probe
  source 1..33: mol_type = other DNA

SEQ ID NO: 45776 - DNA, 34 bp, synthetic construct; identical to SEQ ID NO: 3822
  misc_feature 1..34: note = Probe
  source 1..34: mol_type = other DNA

SEQ ID NO: 45777 - DNA, 35 bp, synthetic construct; identical to SEQ ID NO: 3823
  misc_feature 1..35: note = Probe
  source 1..35: mol_type = other DNA

SEQ ID NO: 45778 - DNA, 16 bp, synthetic construct
  misc_feature 1..16: note = Probe
  source 1..16: mol_type = other DNA
atgcccctcatttaca

SEQ ID NO: 45779 - DNA, 18 bp, synthetic construct
  misc_feature 1..18: note = Probe
  source 1..18: mol_type = other DNA
atgcccctcatttacata

SEQ ID NO: 45780 - DNA, 21 bp, synthetic construct
  misc_feature 1..21: note = Probe
  source 1..21: mol_type = other DNA
atgcccctcatttacataaat

SEQ ID NO: 45781 - DNA, 22 bp, synthetic construct
  misc_feature 1..22: note = Probe
  source 1..22: mol_type = other DNA
atgcccctcatttacataaata

SEQ ID NO: 45782 - DNA, 27 bp, synthetic construct
  misc_feature 1..27: note = Probe
  source 1..27: mol_type = other DNA
atgcccctcatttacataaatattata

SEQ ID NO: 45783 - DNA, 29 bp, synthetic construct
  misc_feature 1..29: note = Probe
  source 1..29: mol_type = other DNA
atgcccctcatttacataaatattatact

SEQ ID NO: 45784 - DNA, 30 bp, synthetic construct; identical to SEQ ID NO: 3825
  misc_feature 1..30: note = Probe
  source 1..30: mol_type = other DNA

SEQ ID NO: 45785 - DNA, 32 bp, synthetic construct
  misc_feature 1..32: note = Probe
  source 1..32: mol_type = other DNA
atgccgaggttgtgagttcgagcctcacctgg

SEQ ID NO: 45786 - DNA, 36 bp, synthetic construct; identical to SEQ ID NO: 17435
  misc_feature 1..36: note = Probe
  source 1..36: mol_type = other DNA

SEQ ID NO: 45787 - DNA, 45 bp, synthetic construct; identical to SEQ ID NO: 17436
  misc_feature 1..45: note = Probe
  source 1..45: mol_type = other DNA

SEQ ID NO: 45788 - DNA, 27 bp, synthetic construct
  misc_feature 1..27: note = Probe
  source 1..27: mol_type = other DNA
atggatcgaaaccatcctctgctaggt

SEQ ID NO: 45789 - DNA, 16 bp, synthetic construct
  misc_feature 1..16: note = Probe
  source 1..16: mol_type = other DNA
atggcacatgcagcgc

SEQ ID NO: 45790 - DNA, 17 bp, synthetic construct
  misc_feature 1..17: note = Probe
  source 1..17: mol_type = other DNA
atggcacatgcagcgca

SEQ ID NO: 45791 - DNA, 18 bp, synthetic construct
  misc_feature 1..18: note = Probe
  source 1..18: mol_type = other DNA
atggcacatgcagcgcaa

SEQ ID NO: 45792 - DNA, 19 bp, synthetic construct
  misc_feature 1..19: note = Probe
  source 1..19: mol_type = other DNA
atggcacatgcagcgcaag

SEQ ID NO: 45793 - DNA, 20 bp, synthetic construct
  misc_feature 1..20: note = Probe
  source 1..20: mol_type = other DNA
atggcacatgcagcgcaagt

SEQ ID NO: 45794 - DNA, 21 bp, synthetic construct
  misc_feature 1..21: note = Probe
  source 1..21: mol_type = other DNA
atggcacatgcagcgcaagta

SEQ ID NO: 45795 - DNA, 22 bp, synthetic construct
  misc_feature 1..22: note = Probe
  source 1..22: mol_type = other DNA
atggcacatgcagcgcaagtag

SEQ ID NO: 45796 - DNA, 23 bp, synthetic construct
  misc_feature 1..23: note = Probe
  source 1..23: mol_type = other DNA
atggcacatgcagcgcaagtagg

SEQ ID NO: 45797 - DNA, 24 bp, synthetic construct
  misc_feature 1..24: note = Probe
  source 1..24: mol_type = other DNA
atggcacatgcagcgcaagtaggt

SEQ ID NO: 45798 - DNA, 25 bp, synthetic construct
  misc_feature 1..25: note = Probe
  source 1..25: mol_type = other DNA
atggcacatgcagcgcaagtaggtc

SEQ ID NO: 45799 - DNA, 26 bp, synthetic construct
  misc_feature 1..26: note = Probe
  source 1..26: mol_type = other DNA
atggcacatgcagcgcaagtaggtct

SEQ ID NO: 45800 - DNA, 27 bp, synthetic construct
  misc_feature 1..27: note = Probe
  source 1..27: mol_type = other DNA
atggcacatgcagcgcaagtaggtcta

SEQ ID NO: 45801 - DNA, 28 bp, synthetic construct
  misc_feature 1..28: note = Probe
  source 1..28: mol_type = other DNA
atggcacatgcagcgcaagtaggtctac

SEQ ID NO: 45802 - DNA, 29 bp, synthetic construct
  misc_feature 1..29: note = Probe
  source 1..29: mol_type = other DNA
atggcacatgcagcgcaagtaggtctaca

SEQ ID NO: 45803 - DNA, 30 bp, synthetic construct; identical to SEQ ID NO: 3841
  misc_feature 1..30: note = Probe
  source 1..30: mol_type = other DNA

SEQ ID NO: 45804 - DNA, 22 bp, synthetic construct
  misc_feature 1..22: note = Probe
  source 1..22: mol_type = other DNA
atggccaacctcctactcctca

SEQ ID NO: 45805 - DNA, 25 bp, synthetic construct
  misc_feature 1..25: note = Probe
  source 1..25: mol_type = other DNA
atggggtgtgataggtggcacggag

SEQ ID NO: 45806 - DNA, 46 bp, synthetic construct
  misc_feature 1..46: note = Probe
  source 1..46: mol_type = other DNA
atggggttggcttgaaaccagctttggggggttcgattccttcctt

SEQ ID NO: 45807 - DNA, 30 bp, synthetic construct; identical to SEQ ID NO: 3846
  misc_feature 1..30: note = Probe
  source 1..30: mol_type = other DNA

SEQ ID NO: 45808 - DNA, 31 bp, synthetic construct; identical to SEQ ID NO: 3847
  misc_feature 1..31: note = Probe
  source 1..31: mol_type = other DNA

SEQ ID NO: 45809 - DNA, 35 bp, synthetic construct; identical to SEQ ID NO: 3849
  misc_feature 1..35: note = Probe
  source 1..35: mol_type = other DNA

SEQ ID NO: 45810 - DNA, 33 bp, synthetic construct; identical to SEQ ID NO: 28914
  misc_feature 1..33: note = Probe
  source 1..33: mol_type = other DNA

SEQ ID NO: 45811 - DNA, 38 bp, synthetic construct
  misc_feature 1..38: note = Probe
  source 1..38: mol_type = other DNA
atggtttttcatatcattggtcgtggttgtagtccgtg

SEQ ID NO: 45812 - DNA, 25 bp, synthetic construct
  misc_feature 1..25: note = Probe
  source 1..25: mol_type = other DNA
atgtcgttagtctaggctgtcagct

SEQ ID NO: 45813 - DNA, 18 bp, synthetic construct
  misc_feature 1..18: note = Probe
  source 1..18: mol_type = other DNA
atgtctaacaacatggct

SEQ ID NO: 45814 - DNA, 24 bp, synthetic construct
  misc_feature 1..24: note = Probe
  source 1..24: mol_type = other DNA
atgtctaacaacatggctttctca

SEQ ID NO: 45815 - DNA, 26 bp, synthetic construct
  misc_feature 1..26: note = Probe
  source 1..26: mol_type = other DNA
atgtctaacaacatggctttctcaac

SEQ ID NO: 45816 - DNA, 27 bp, synthetic construct
  misc_feature 1..27: note = Probe
  source 1..27: mol_type = other DNA
atgtctaacaacatggctttctcaact

SEQ ID NO: 45817 - DNA, 26 bp, synthetic construct
  misc_feature 1..26: note = Probe
  source 1..26: mol_type = other DNA
atgttggttatacccttcccgtacta

SEQ ID NO: 45818 - DNA, 17 bp, synthetic construct
  misc_feature 1..17: note = Probe
  source 1..17: mol_type = other DNA
atgtttagacgggctca

SEQ ID NO: 45819 - DNA, 18 bp, synthetic construct
  misc_feature 1..18: note = Probe
  source 1..18: mol_type = other DNA
atgtttagacgggctcac

SEQ ID NO: 45820 - DNA, 22 bp, synthetic construct
  misc_feature 1..22: note = Probe
  source 1..22: mol_type = other DNA
atgtttagacgggctcacatca

SEQ ID NO: 45821 - DNA, 29 bp, synthetic construct
  misc_feature 1..29: note = Probe
  source 1..29: mol_type = other DNA
atgtttagacgggctcacatcaccccata

SEQ ID NO: 45822 - DNA, 30 bp, synthetic construct; identical to SEQ ID NO: 419
  misc_feature 1..30: note = Probe
  source 1..30: mol_type = other DNA

SEQ ID NO: 45823 - DNA, 33 bp, synthetic construct; identical to SEQ ID NO: 3865
  misc_feature 1..33: note = Probe
  source 1..33: mol_type = other DNA

SEQ ID NO: 45824 - DNA, 34 bp, synthetic construct
  misc_feature 1..34: note = Probe
  source 1..34: mol_type = other DNA
atgtttagacgggctcacatcaccccataaacaa

SEQ ID NO: 45825 - DNA, 35 bp, synthetic construct; identical to SEQ ID NO: 3866
  misc_feature 1..35: note = Probe
  source 1..35: mol_type = other DNA

SEQ ID NO: 45826 - DNA, 36 bp, synthetic construct; identical to SEQ ID NO: 3867
  misc_feature 1..36: note = Probe
  source 1..36: mol_type = other DNA

SEQ ID NO: 45827 - DNA, 37 bp, synthetic construct; identical to SEQ ID NO: 3868
  misc_feature 1..37: note = Probe
  source 1..37: mol_type = other DNA

SEQ ID NO: 45828 - DNA, 38 bp, synthetic construct; identical to SEQ ID NO: 3869
  misc_feature 1..38: note = Probe
  source 1..38: mol_type = other DNA

SEQ ID NO: 45829 - DNA, 50 bp, synthetic construct; identical to SEQ ID NO: 3870
  misc_feature 1..50: note = Probe
  source 1..50: mol_type = other DNA

SEQ ID NO: 45830 - DNA, 31 bp, synthetic construct; identical to SEQ ID NO: 17497
  misc_feature 1..31: note = Probe
  source 1..31: mol_type = other DNA

SEQ ID NO: 45831 - DNA, 32 bp, synthetic construct; identical to SEQ ID NO: 12838
  misc_feature 1..32: note = Probe
  source 1..32: mol_type = other DNA

SEQ ID NO: 45832 - DNA, 33 bp, synthetic construct; identical to SEQ ID NO: 3873
  misc_feature 1..33: note = Probe
  source 1..33: mol_type = other DNA

SEQ ID NO: 45833 - DNA, 22 bp, synthetic construct
  misc_feature 1..22: note = Probe
  source 1..22: mol_type = other DNA
attaatcccctggcccaacccg

SEQ ID NO: 45834 - DNA, 30 bp, synthetic construct; identical to SEQ ID NO: 3877
  misc_feature 1..30: note = Probe
  source 1..30: mol_type = other DNA

SEQ ID NO: 45835 - DNA, 32 bp, synthetic construct
  misc_feature 1..32: note = Probe
  source 1..32: mol_type = other DNA
attagaatcttagctttgggtgctaatggtgg

SEQ ID NO: 45836 - DNA, 50 bp, synthetic construct; identical to SEQ ID NO: 420
  misc_feature 1..50: note = Probe
  source 1..50: mol_type = other DNA

SEQ ID NO: 45837 - DNA, 50 bp, synthetic construct; identical to SEQ ID NO: 421
  misc_feature 1..50: note = Probe
  source 1..50: mol_type = other DNA

SEQ ID NO: 45838 - DNA, 26 bp, synthetic construct
  misc_feature 1..26: note = Probe
  source 1..26: mol_type = other DNA
attccaggttcgactcctggctggct

SEQ ID NO: 45839 - DNA, 45 bp, synthetic construct; identical to SEQ ID NO: 17522
  misc_feature 1..45: note = Probe
  source 1..45: mol_type = other DNA

SEQ ID NO: 45840 - DNA, 50 bp, synthetic construct; identical to SEQ ID NO: 38673
  misc_feature 1..50: note = Probe
  source 1..50: mol_type = other DNA

SEQ ID NO: 45841 - DNA, 19 bp, synthetic construct
  misc_feature 1..19: note = Probe
  source 1..19: mol_type = other DNA
attcccggtcagggaacca

SEQ ID NO: 45842 - DNA, 49 bp, synthetic construct; identical to SEQ ID NO: 3881
  misc_feature 1..49: note = Probe
  source 1..49: mol_type = other DNA

SEQ ID NO: 45843 - DNA, 50 bp, synthetic construct; identical to SEQ ID NO: 3882
  misc_feature 1..50: note = Probe
  source 1..50: mol_type = other DNA

SEQ ID NO: 45844 - DNA, 50 bp, synthetic construct; identical to SEQ ID NO: 3883
  misc_feature 1..50: note = Probe
  source 1..50: mol_type = other DNA

SEQ ID NO: 45845 - DNA, 50 bp, synthetic construct; identical to SEQ ID NO: 38687
  misc_feature 1..50: note = Probe
  source 1..50: mol_type = other DNA

SEQ ID NO: 45846 - DNA, 31 bp, synthetic construct; identical to SEQ ID NO: 3884
  misc_feature 1..31: note = Probe
  source 1..31: mol_type = other DNA

SEQ ID NO: 45847 - DNA, 32 bp, synthetic construct; identical to SEQ ID NO: 29006
  misc_feature 1..32: note = Probe
  source 1..32: mol_type = other DNA

SEQ ID NO: 45848 - DNA, 33 bp, synthetic construct; identical to SEQ ID NO: 3885
  misc_feature 1..33: note = Probe
  source 1..33: mol_type = other DNA

SEQ ID NO: 45849 - DNA, 36 bp, synthetic construct; identical to SEQ ID NO: 3887
  misc_feature 1..36: note = Probe
  source 1..36: mol_type = other DNA

SEQ ID NO: 45850 - DNA, 37 bp, synthetic construct; identical to SEQ ID NO: 3888
  misc_feature 1..37: note = Probe
  source 1..37: mol_type = other DNA

SEQ ID NO: 45851 - DNA, 26 bp, synthetic construct
  misc_feature 1..26: note = Probe
  source 1..26: mol_type = other DNA
attctaggttcgactcctggctggct

SEQ ID NO: 45852 - DNA, 33 bp, synthetic construct; identical to SEQ ID NO: 29023
  misc_feature 1..33: note = Probe
  source 1..33: mol_type = other DNA

SEQ ID NO: 45853 - DNA, 38 bp, synthetic construct; identical to SEQ ID NO: 3893
  misc_feature 1..38: note = Probe
  source 1..38: mol_type = other DNA

SEQ ID NO: 45854 - DNA, 23 bp, synthetic construct
  misc_feature 1..23: note = Probe
  source 1..23: mol_type = other DNA
attcttgcgacccgggttcgatt

SEQ ID NO: 45855 - DNA, 38 bp, synthetic construct; identical to SEQ ID NO: 3895
  misc_feature 1..38: note = Probe
  source 1..38: mol_type = other DNA

SEQ ID NO: 45856 - DNA, 39 bp, synthetic construct; identical to SEQ ID NO: 3896
  misc_feature 1..39: note = Probe
  source 1..39: mol_type = other DNA

SEQ ID NO: 45857 - DNA, 50 bp, synthetic construct; identical to SEQ ID NO: 3900
  misc_feature 1..50: note = Probe
  source 1..50: mol_type = other DNA

SEQ ID NO: 45858 - DNA, 30 bp, synthetic construct
  misc_feature 1..30: note = Probe
  source 1..30: mol_type = other DNA
attgcaaattcgaagaagcagcttcaaacc

SEQ ID NO: 45859 - DNA, 38 bp, synthetic construct
  misc_feature 1..38: note = Probe
  source 1..38: mol_type = other DNA
attgcaaattcgaagaagcagcttcaaacctgccgggg

SEQ ID NO: 45860 - DNA, 42 bp, synthetic construct; identical to SEQ ID NO: 17547
  misc_feature 1..42: note = Probe
  source 1..42: mol_type = other DNA

SEQ ID NO: 45861 - DNA, 43 bp, synthetic construct; identical to SEQ ID NO: 3905
  misc_feature 1..43: note = Probe
  source 1..43: mol_type = other DNA

SEQ ID NO: 45862 - DNA, 44 bp, synthetic construct; identical to SEQ ID NO: 3906
  misc_feature 1..44: note = Probe
  source 1..44: mol_type = other DNA

SEQ ID NO: 45863 - DNA, 50 bp, synthetic construct; identical to SEQ ID NO: 38701
  misc_feature 1..50: note = Probe
  source 1..50: mol_type = other DNA

SEQ ID NO: 45864 - DNA, 32 bp, synthetic construct; identical to SEQ ID NO: 17555
  misc_feature 1..32: note = Probe
  source 1..32: mol_type = other DNA

SEQ ID NO: 45865 - DNA, 33 bp, synthetic construct; identical to SEQ ID NO: 3910
  misc_feature 1..33: note = Probe
  source 1..33: mol_type = other DNA

SEQ ID NO: 45866 - DNA, 34 bp, synthetic construct; identical to SEQ ID NO: 3911
  misc_feature 1..34: note = Probe
  source 1..34: mol_type = other DNA

SEQ ID NO: 45867 - DNA, 25 bp, synthetic construct
  misc_feature 1..25: note = Probe
  source 1..25: mol_type = other DNA
attggtggttcagtggtagaattct

SEQ ID NO: 45868 - DNA, 27 bp, synthetic construct
  misc_feature 1..27: note = Probe
  source 1..27: mol_type = other DNA
attggtggttcagtggtagaattctcg

SEQ ID NO: 45869 - DNA, 28 bp, synthetic construct
  misc_feature 1..28: note = Probe
  source 1..28: mol_type = other DNA
attggtggttcagtggtagaattctcgc

SEQ ID NO: 45870 - DNA, 29 bp, synthetic construct
  misc_feature 1..29: note = Probe
  source 1..29: mol_type = other DNA
attggtggttcagtggtagaattctcgcc

SEQ ID NO: 45871 - DNA, 30 bp, synthetic construct; identical to SEQ ID NO: 3916
  misc_feature 1..30: note = Probe
  source 1..30: mol_type = other DNA

SEQ ID NO: 45872 - DNA, 31 bp, synthetic construct; identical to SEQ ID NO: 3919
  misc_feature 1..31: note = Probe
  source 1..31: mol_type = other DNA

SEQ ID NO: 45873 - DNA, 32 bp, synthetic construct; identical to SEQ ID NO: 3920
  misc_feature 1..32: note = Probe
  source 1..32: mol_type = other DNA

SEQ ID NO: 45874 - DNA, 33 bp, synthetic construct; identical to SEQ ID NO: 3921
  misc_feature 1..33: note = Probe
  source 1..33: mol_type = other DNA

SEQ ID NO: 45875 - DNA, 18 bp, synthetic construct
  misc_feature 1..18: note = Probe
  source 1..18: mol_type = other DNA
attgtgaatctgacaaca

SEQ ID NO: 45876 - DNA, 26 bp, synthetic construct
  misc_feature 1..26: note = Probe
  source 1..26: mol_type = other DNA
attgtgaatctgacaacagaggctta

SEQ ID NO: 45877 - DNA, 31 bp, synthetic construct; identical to SEQ ID NO: 3923
  misc_feature 1..31: note = Probe
  source 1..31: mol_type = other DNA

SEQ ID NO: 45878 - DNA, 43 bp, synthetic construct; identical to SEQ ID NO: 3930
  misc_feature 1..43: note = Probe
  source 1..43: mol_type = other DNA

SEQ ID NO: 45879 - DNA, 44 bp, synthetic construct; identical to SEQ ID NO: 3931
  misc_feature 1..44: note = Probe
  source 1..44: mol_type = other DNA

SEQ ID NO: 45880 - DNA, 45 bp, synthetic construct; identical to SEQ ID NO: 3932
  misc_feature 1..45: note = Probe
  source 1..45: mol_type = other DNA

SEQ ID NO: 45881 - DNA, 50 bp, synthetic construct; identical to SEQ ID NO: 3934
  misc_feature 1..50: note = Probe
  source 1..50: mol_type = other DNA

SEQ ID NO: 45882 - DNA, 27 bp, synthetic construct
  misc_feature 1..27: note = Probe
  source 1..27: mol_type = other DNA
atttcaacttaacttgaccgctctgag

SEQ ID NO: 45883 - DNA, 28 bp, synthetic construct
  misc_feature 1..28: note = Probe
  source 1..28: mol_type = other DNA
atttcaacttaacttgaccgctctgagc

SEQ ID NO: 45884 - DNA, 29 bp, synthetic construct
  misc_feature 1..29: note = Probe
  source 1..29: mol_type = other DNA
atttcaacttaacttgaccgctctgagct

SEQ ID NO: 45885 - DNA, 41 bp, synthetic construct; identical to SEQ ID NO: 17589
  misc_feature 1..41: note = Probe
  source 1..41: mol_type = other DNA

SEQ ID NO: 45886 - DNA, 45 bp, synthetic construct; identical to SEQ ID NO: 29095
  misc_feature 1..45: note = Probe
  source 1..45: mol_type = other DNA

SEQ ID NO: 45887 - DNA, 26 bp, synthetic construct
  misc_feature 1..26: note = Probe
  source 1..26: mol_type = other DNA
caaaaattttggtgcaactccaaata

SEQ ID NO: 45888 - DNA, 35 bp, synthetic construct; identical to SEQ ID NO: 17591
  misc_feature 1..35: note = Probe
  source 1..35: mol_type = other DNA

SEQ ID NO: 45889 - DNA, 26 bp, synthetic construct
  misc_feature 1..26: note = Probe
  source 1..26: mol_type = other DNA
caaaacatcagattgtgaatctgaca

SEQ ID NO: 45890 - DNA, 27 bp, synthetic construct
  misc_feature 1..27: note = Probe
  source 1..27: mol_type = other DNA
caaaacatcagattgtgaatctgacaa

SEQ ID NO: 45891 - DNA, 28 bp, synthetic construct
  misc_feature 1..28: note = Probe
  source 1..28: mol_type = other DNA
caaaacatcagattgtgaatctgacaac

SEQ ID NO: 45892 - DNA, 29 bp, synthetic construct
  misc_feature 1..29: note = Probe
  source 1..29: mol_type = other DNA
caaaacatcagattgtgaatctgacaaca

SEQ ID NO: 45893 - DNA, 31 bp, synthetic construct; identical to SEQ ID NO: 17597
  misc_feature 1..31: note = Probe
  source 1..31: mol_type = other DNA

SEQ ID NO: 45894 - DNA, 32 bp, synthetic construct; identical to SEQ ID NO: 3949
  misc_feature 1..32: note = Probe
  source 1..32: mol_type = other DNA

SEQ ID NO: 45895 - DNA, 33 bp, synthetic construct; identical to SEQ ID NO: 3950
  misc_feature 1..33: note = Probe
  source 1..33: mol_type = other DNA

SEQ ID NO: 45896 - DNA, 34 bp, synthetic construct; identical to SEQ ID NO: 3951
  misc_feature 1..34: note = Probe
  source 1..34: mol_type = other DNA

SEQ ID NO: 45897 - DNA, 35 bp, synthetic construct; identical to SEQ ID NO: 3952
  misc_feature 1..35: note = Probe
  source 1..35: mol_type = other DNA

SEQ ID NO: 45898 - DNA, 45 bp, synthetic construct; identical to SEQ ID NO: 435
  misc_feature 1..45: note = Probe
  source 1..45: mol_type = other DNA

SEQ ID NO: 45899 - DNA, 48 bp, synthetic construct; identical to SEQ ID NO: 3954
  misc_feature 1..48: note = Probe
  source 1..48: mol_type = other DNA

SEQ ID NO: 45900 - DNA, 49 bp, synthetic construct; identical to SEQ ID NO: 3955
  misc_feature 1..49: note = Probe
  source 1..49: mol_type = other DNA

SEQ ID NO: 45901 - DNA, 49 bp, synthetic construct; identical to SEQ ID NO: 3957
  misc_feature 1..49: note = Probe
  source 1..49: mol_type = other DNA

SEQ ID NO: 45902 - DNA, 50 bp, synthetic construct; identical to SEQ ID NO: 3958
  misc_feature 1..50: note = Probe
  source 1..50: mol_type = other DNA

SEQ ID NO: 45903 - DNA, 16 bp, synthetic construct
  misc_feature 1..16: note = Probe
  source 1..16: mol_type = other DNA
caaacccactccacct

SEQ ID NO: 45904 - DNA, 16 bp, synthetic construct
  misc_feature 1..16: note = Probe
  source 1..16: mol_type = other DNA
caaagcaatacactga

SEQ ID NO: 45905 - DNA, 17 bp, synthetic construct
  misc_feature 1..17: note = Probe
  source 1..17: mol_type = other DNA
caaagcaatacactgaa

SEQ ID NO: 45906 - DNA, 30 bp, synthetic construct; identical to SEQ ID NO: 17624
  misc_feature 1..30: note = Probe
  source 1..30: mol_type = other DNA

SEQ ID NO: 45907 - DNA, 33 bp, synthetic construct; identical to SEQ ID NO: 12851
  misc_feature 1..33: note = Probe
  source 1..33: mol_type = other DNA

SEQ ID NO: 45908 - DNA, 37 bp, synthetic construct; identical to SEQ ID NO: 439
  misc_feature 1..37: note = Probe
  source 1..37: mol_type = other DNA

SEQ ID NO: 45909 - DNA, 18 bp, synthetic construct
  misc_feature 1..18: note = Probe
  source 1..18: mol_type = other DNA
caaagcacccaacttaca

SEQ ID NO: 45910 - DNA, 21 bp, synthetic construct
  misc_feature 1..21: note = Probe
  source 1..21: mol_type = other DNA
caaagcacccaacttacactt

SEQ ID NO: 45911 - DNA, 25 bp, synthetic construct
  misc_feature 1..25: note = Probe
  source 1..25: mol_type = other DNA
caaagcacccaacttacacttagga

SEQ ID NO: 45912 - DNA, 26 bp, synthetic construct
  misc_feature 1..26: note = Probe
  source 1..26: mol_type = other DNA
caaagcacccaacttacacttaggag

SEQ ID NO: 45913 - DNA, 27 bp, synthetic construct
  misc_feature 1..27: note = Probe
  source 1..27: mol_type = other DNA
caaagcacccaacttacacttaggaga

SEQ ID NO: 45914 - DNA, 28 bp, synthetic construct
  misc_feature 1..28: note = Probe
  source 1..28: mol_type = other DNA
caaagcacccaacttacacttaggagat

SEQ ID NO: 45915 - DNA, 29 bp, synthetic construct
  misc_feature 1..29: note = Probe
  source 1..29: mol_type = other DNA
caaagcacccaacttacacttaggagatt

SEQ ID NO: 45916 - DNA, 30 bp, synthetic construct; identical to SEQ ID NO: 17635
  misc_feature 1..30: note = Probe
  source 1..30: mol_type = other DNA

SEQ ID NO: 45917 - DNA, 32 bp, synthetic construct; identical to SEQ ID NO: 3981
  misc_feature 1..32: note = Probe
  source 1..32: mol_type = other DNA

SEQ ID NO: 45918 - DNA, 35 bp, synthetic construct; identical to SEQ ID NO: 3984
  misc_feature 1..35: note = Probe
  source 1..35: mol_type = other DNA

SEQ ID NO: 45919 - DNA, 44 bp, synthetic construct; identical to SEQ ID NO: 445
  misc_feature 1..44: note = Probe
  source 1..44: mol_type = other DNA

SEQ ID NO: 45920 - DNA, 31 bp, synthetic construct; identical to SEQ ID NO: 17643
  misc_feature 1..31: note = Probe
  source 1..31: mol_type = other DNA

SEQ ID NO: 45921 - DNA, 29 bp, synthetic construct
  misc_feature 1..29: note = Probe
  source 1..29: mol_type = other DNA
caaagttaaattataggctaaatcctata

SEQ ID NO: 45922 - DNA, 31 bp, synthetic construct; identical to SEQ ID NO: 3988
  misc_feature 1..31: note = Probe
  source 1..31: mol_type = other DNA

SEQ ID NO: 45923 - DNA, 33 bp, synthetic construct
  misc_feature 1..33: note = Probe
  source 1..33: mol_type = other DNA
caaagttaaattataggctaaatcctatatatc

SEQ ID NO: 45924 - DNA, 21 bp, synthetic construct
  misc_feature 1..21: note = Probe
  source 1..21: mol_type = other DNA
caaatcacgtcggggtcaaca

SEQ ID NO: 45925 - DNA, 19 bp, synthetic construct
  misc_feature 1..19: note = Probe
  source 1..19: mol_type = other DNA
caaatcccggacgagcccc

SEQ ID NO: 45926 - DNA, 20 bp, synthetic construct
  misc_feature 1..20: note = Probe
  source 1..20: mol_type = other DNA
caaatcccggacgagccccc

SEQ ID NO: 45927 - DNA, 21 bp, synthetic construct
  misc_feature 1..21: note = Probe
  source 1..21: mol_type = other DNA
caaatcccggacgagccccct

SEQ ID NO: 45928 - DNA, 21 bp, synthetic construct
  misc_feature 1..21: note = Probe
  source 1..21: mol_type = other DNA
caaatccgggtgccccctcaa

SEQ ID NO: 45929 - DNA, 18 bp, synthetic construct
  misc_feature 1..18: note = Probe
  source 1..18: mol_type = other DNA
caaatctcggtggaacct

SEQ ID NO: 45930 - DNA, 39 bp, synthetic construct; identical to SEQ ID NO: 3994
  misc_feature 1..39: note = Probe
  source 1..39: mol_type = other DNA

SEQ ID NO: 45931 - DNA, 40 bp, synthetic construct; identical to SEQ ID NO: 3995
  misc_feature 1..40: note = Probe
  source 1..40: mol_type = other DNA

SEQ ID NO: 45932 - DNA, 20 bp, synthetic construct
  misc_feature 1..20: note = Probe
  source 1..20: mol_type = other DNA
caacacctctttacagtgaa

SEQ ID NO: 45933 - DNA, 22 bp, synthetic construct
  misc_feature 1..22: note = Probe
  source 1..22: mol_type = other DNA
caacacctctttacagtgaaat

SEQ ID NO: 45934 - DNA, 29 bp, synthetic construct
  misc_feature 1..29: note = Probe
  source 1..29: mol_type = other DNA
caacagaggcttacgaccccttatttacc

SEQ ID NO: 45935 - DNA, 30 bp, synthetic construct; identical to SEQ ID NO: 4001
  misc_feature 1..30: note = Probe
  source 1..30: mol_type = other DNA

SEQ ID NO: 45936 - DNA, 31 bp, synthetic construct; identical to SEQ ID NO: 4002
  misc_feature 1..31: note = Probe
  source 1..31: mol_type = other DNA

SEQ ID NO: 45937 - DNA, 32 bp, synthetic construct; identical to SEQ ID NO: 4003
  misc_feature 1..32: note = Probe
  source 1..32: mol_type = other DNA

SEQ ID NO: 45938 - DNA, 29 bp, synthetic construct
  misc_feature 1..29: note = Probe
  source 1..29: mol_type = other DNA
caacctcggttcgaatccgagtcacggca

SEQ ID NO: 45939 - DNA, 31 bp, synthetic construct; identical to SEQ ID NO: 4006
  misc_feature 1..31: note = Probe
  source 1..31: mol_type = other DNA

SEQ ID NO: 45940 - DNA, 31 bp, synthetic construct; identical to SEQ ID NO: 4007
  misc_feature 1..31: note = Probe
  source 1..31: mol_type = other DNA

SEQ ID NO: 45941 - DNA, 32 bp, synthetic construct; identical to SEQ ID NO: 4008
  misc_feature 1..32: note = Probe
  source 1..32: mol_type = other DNA

SEQ ID NO: 45942 - DNA, 31 bp, synthetic construct; identical to SEQ ID NO: 4009
  misc_feature 1..31: note = Probe
  source 1..31: mol_type = other DNA

SEQ ID NO: 45943 - DNA, 32 bp, synthetic construct; identical to SEQ ID NO: 4010
  misc_feature 1..32: note = Probe
  source 1..32: mol_type = other DNA

SEQ ID NO: 45944 - DNA, 28 bp, synthetic construct
  misc_feature 1..28: note = Probe
  source 1..28: mol_type = other DNA
caacgatggtttttcatatcattggtcg

SEQ ID NO: 45945 - DNA, 35 bp, synthetic construct
  misc_feature 1..35: note = Probe
  source 1..35: mol_type = other DNA
caacgatggtttttcatatcattggtcgtggttgt

SEQ ID NO: 45946 - DNA, 39 bp, synthetic construct; identical to SEQ ID NO: 29167
  misc_feature 1..39: note = Probe
  source 1..39: mol_type = other DNA

SEQ ID NO: 45947 - DNA, 43 bp, synthetic construct
  misc_feature 1..43: note = Probe
  source 1..43: mol_type = other DNA
caacgatggtttttcatatcattggtcgtggttgtagtccgtg

SEQ ID NO: 45948 - DNA, 45 bp, synthetic construct
  misc_feature 1..45: note = Probe
  source 1..45: mol_type = other DNA
caacgatggtttttcatatcattggtcgtggttgtagtccgtgcg

SEQ ID NO: 45949 - DNA, 50 bp, synthetic construct; identical to SEQ ID NO: 4011
  misc_feature 1..50: note = Probe
  source 1..50: mol_type = other DNA

SEQ ID NO: 45950 - DNA, 22 bp, synthetic construct
  misc_feature 1..22: note = Probe
  source 1..22: mol_type = other DNA
caactaaatactaccgtatggc

SEQ ID NO: 45951 - DNA, 16 bp, synthetic construct
  misc_feature 1..16: note = Probe
  source 1..16: mol_type = other DNA
caacttaacttgaccg

SEQ ID NO: 45952 - DNA, 17 bp, synthetic construct
  misc_feature 1..17: note = Probe
  source 1..17: mol_type = other DNA
caacttaacttgaccgc

SEQ ID NO: 45953 - DNA, 18 bp, synthetic construct
  misc_feature 1..18: note = Probe
  source 1..18: mol_type = other DNA
caacttaacttgaccgct

SEQ ID NO: 45954 - DNA, 19 bp, synthetic construct
  misc_feature 1..19: note = Probe
  source 1..19: mol_type = other DNA
caacttaacttgaccgctc

SEQ ID NO: 45955 - DNA, 20 bp, synthetic construct
  misc_feature 1..20: note = Probe
  source 1..20: mol_type = other DNA
caacttaacttgaccgctct

SEQ ID NO: 45956 - DNA, 22 bp, synthetic construct
  misc_feature 1..22: note = Probe
  source 1..22: mol_type = other DNA
caacttaacttgaccgctctga

SEQ ID NO: 45957 - DNA, 23 bp, synthetic construct
  misc_feature 1..23: note = Probe
  source 1..23: mol_type = other DNA
caacttaacttgaccgctctgag

SEQ ID NO: 45958 - DNA, 24 bp, synthetic construct
  misc_feature 1..24: note = Probe
  source 1..24: mol_type = other DNA
caacttaacttgaccgctctgagc

SEQ ID NO: 45959 - DNA, 25 bp, synthetic construct
  misc_feature 1..25: note = Probe
  source 1..25: mol_type = other DNA
caacttaacttgaccgctctgagct

SEQ ID NO: 45960 - DNA, 16 bp, synthetic construct
  misc_feature 1..16: note = Probe
  source 1..16: mol_type = other DNA
caacttacacttagga

SEQ ID NO: 45961 - DNA, 17 bp, synthetic construct
  misc_feature 1..17: note = Probe
  source 1..17: mol_type = other DNA
caacttacacttaggag

SEQ ID NO: 45962 - DNA, 18 bp, synthetic construct
  misc_feature 1..18: note = Probe
  source 1..18: mol_type = other DNA
caacttacacttaggaga

SEQ ID NO: 45963 - DNA, 19 bp, synthetic construct
  misc_feature 1..19: note = Probe
  source 1..19: mol_type = other DNA
caacttacacttaggagat

SEQ ID NO: 45964 - DNA, 20 bp, synthetic construct
  misc_feature 1..20: note = Probe
  source 1..20: mol_type = other DNA
caacttacacttaggagatt

SEQ ID NO: 45965 - DNA, 21 bp, synthetic construct
  misc_feature 1..21: note = Probe
  source 1..21: mol_type = other DNA
caacttacacttaggagattt

SEQ ID NO: 45966 - DNA, 23 bp, synthetic construct
  misc_feature 1..23: note = Probe
  source 1..23: mol_type = other DNA
caacttacacttaggagatttca

SEQ ID NO: 45967 - DNA, 26 bp, synthetic construct
  misc_feature 1..26: note = Probe
  source 1..26: mol_type = other DNA
caacttacacttaggagatttcaact

SEQ ID NO: 45968 - DNA, 27 bp, synthetic construct
  misc_feature 1..27: note = Probe
  source 1..27: mol_type = other DNA
caacttacacttaggagatttcaactt

SEQ ID NO: 45969 - DNA, 28 bp, synthetic construct
  misc_feature 1..28: note = Probe
  source 1..28: mol_type = other DNA
caacttacacttaggagatttcaactta

SEQ ID NO: 45970 - DNA, 29 bp, synthetic construct
  misc_feature 1..29: note = Probe
  source 1..29: mol_type = other DNA
caacttacacttaggagatttcaacttaa

SEQ ID NO: 45971 - DNA, 30 bp, synthetic construct
  misc_feature 1..30: note = Probe
  source 1..30: mol_type = other DNA
caacttacacttaggagatttcaacttaac

SEQ ID NO: 45972 - DNA, 31 bp, synthetic construct; identical to SEQ ID NO: 17688
  misc_feature 1..31: note = Probe
  source 1..31: mol_type = other DNA

SEQ ID NO: 45973 - DNA, 32 bp, synthetic construct; identical to SEQ ID NO: 17689
  misc_feature 1..32: note = Probe
  source 1..32: mol_type = other DNA

SEQ ID NO: 45974 - DNA, 33 bp, synthetic construct; identical to SEQ ID NO: 4024
  misc_feature 1..33: note = Probe
  source 1..33: mol_type = other DNA

SEQ ID NO: 45975 - DNA, 35 bp, synthetic construct; identical to SEQ ID NO: 4025
  misc_feature 1..35: note = Probe
  source 1..35: mol_type = other DNA

SEQ ID NO: 45976 - DNA, 36 bp, synthetic construct; identical to SEQ ID NO: 17692
  misc_feature 1..36: note = Probe
  source 1..36: mol_type = other DNA

SEQ ID NO: 45977 - DNA, 37 bp, synthetic construct; identical to SEQ ID NO: 4026
  misc_feature 1..37: note = Probe
  source 1..37: mol_type = other DNA

SEQ ID NO: 45978 - DNA, 38 bp, synthetic construct; identical to SEQ ID NO: 17694
  misc_feature 1..38: note = Probe
  source 1..38: mol_type = other DNA

SEQ ID NO: 45979 - DNA, 39 bp, synthetic construct; identical to SEQ ID NO: 4027
  misc_feature 1..39: note = Probe
  source 1..39: mol_type = other DNA

SEQ ID NO: 45980 - DNA, 40 bp, synthetic construct; identical to SEQ ID NO: 29193
  misc_feature 1..40: note = Probe
  source 1..40: mol_type = other DNA

SEQ ID NO: 45981 - DNA, 41 bp, synthetic construct; identical to SEQ ID NO: 4028
  misc_feature 1..41: note = Probe
  source 1..41: mol_type = other DNA

SEQ ID NO: 45982 - DNA, 42 bp, synthetic construct; identical to SEQ ID NO: 17697
  misc_feature 1..42: note = Probe
  source 1..42: mol_type = other DNA

SEQ ID NO: 45983 - DNA, 43 bp, synthetic construct; identical to SEQ ID NO: 4029
  misc_feature 1..43: note = Probe
  source 1..43: mol_type = other DNA

SEQ ID NO: 45984 - DNA, 44 bp, synthetic construct; identical to SEQ ID NO: 4030
  misc_feature 1..44: note = Probe
  source 1..44: mol_type = other DNA

SEQ ID NO: 45985 - DNA, 45 bp, synthetic construct; identical to SEQ ID NO: 4031
  misc_feature 1..45: note = Probe
  source 1..45: mol_type = other DNA

SEQ ID NO: 45986 - DNA, 46 bp, synthetic construct; identical to SEQ ID NO: 4032
  misc_feature 1..46: note = Probe
  source 1..46: mol_type = other DNA

SEQ ID NO: 45987 - DNA, 50 bp, synthetic construct; identical to SEQ ID NO: 4034
  misc_feature 1..50: note = Probe
  source 1..50: mol_type = other DNA

SEQ ID NO: 45988 - DNA, 18 bp, synthetic construct
  misc_feature 1..18: note = Probe
  source 1..18: mol_type = other DNA
caagaacagggtttgtta

SEQ ID NO: 45989 - DNA, 17 bp, synthetic construct
  misc_feature 1..17: note = Probe
  source 1..17: mol_type = other DNA
caagaactgctaactca

SEQ ID NO: 45990 - DNA, 19 bp, synthetic construct
  misc_feature 1..19: note = Probe
  source 1..19: mol_type = other DNA
caagaactgctaactcatg

SEQ ID NO: 45991 - DNA, 29 bp, synthetic construct
  misc_feature 1..29: note = Probe
  source 1..29: mol_type = other DNA
caagaactgctaactcatgcccccatgtc

SEQ ID NO: 45992 - DNA, 34 bp, synthetic construct; identical to SEQ ID NO: 12858
  misc_feature 1..34: note = Probe
  source 1..34: mol_type = other DNA

SEQ ID NO: 45993 - DNA, 42 bp, synthetic construct; identical to SEQ ID NO: 449
  misc_feature 1..42: note = Probe
  source 1..42: mol_type = other DNA

SEQ ID NO: 45994 - DNA, 45 bp, synthetic construct; identical to SEQ ID NO: 451
  misc_feature 1..45: note = Probe
  source 1..45: mol_type = other DNA

SEQ ID NO: 45995 - DNA, 46 bp, synthetic construct; identical to SEQ ID NO: 452
  misc_feature 1..46: note = Probe
  source 1..46: mol_type = other DNA

SEQ ID NO: 45996 - DNA, 50 bp, synthetic construct; identical to SEQ ID NO: 4044
  misc_feature 1..50: note = Probe
  source 1..50: mol_type = other DNA

SEQ ID NO: 45997 - DNA, 23 bp, synthetic construct
  misc_feature 1..23: note = Probe
  source 1..23: mol_type = other DNA
caagcagttgacccgggttcgat

SEQ ID NO: 45998 - DNA, 40 bp, synthetic construct; identical to SEQ ID NO: 17726
  misc_feature 1..40: note = Probe
  source 1..40: mol_type = other DNA

SEQ ID NO: 45999 - DNA, 40 bp, synthetic construct; identical to SEQ ID NO: 17728
  misc_feature 1..40: note = Probe
  source 1..40: mol_type = other DNA

SEQ ID NO: 46000 - DNA, 30 bp, synthetic construct
  misc_feature 1..30: note = Probe
  source 1..30: mol_type = other DNA
caaggtcgcgggttcgatccccgtacgggc

SEQ ID NO: 46001 - DNA, 31 bp, synthetic construct; identical to SEQ ID NO: 29238
  misc_feature 1..31: note = Probe
  source 1..31: mol_type = other DNA

SEQ ID NO: 46002 - DNA, 32 bp, synthetic construct
  misc_feature 1..32: note = Probe
  source 1..32: mol_type = other DNA
caaggtcgcgggttcgatccccgtacgggcca

SEQ ID NO: 46003 - DNA, 33 bp, synthetic construct
  misc_feature 1..33: note = Probe
  source 1..33: mol_type = other DNA
caaggtcgcgggttcgatccccgtacgggccac

SEQ ID NO: 46004 - DNA, 35 bp, synthetic construct; identical to SEQ ID NO: 17729
  misc_feature 1..35: note = Probe
  source 1..35: mol_type = other DNA

SEQ ID NO: 46005 - DNA, 35 bp, synthetic construct; identical to SEQ ID NO: 17730
  misc_feature 1..35: note = Probe
  source 1..35: mol_type = other DNA

SEQ ID NO: 46006 - DNA, 21 bp, synthetic construct
  misc_feature 1..21: note = Probe
  source 1..21: mol_type = other DNA
caagtccctgttcgggcggca

SEQ ID NO: 46007 - DNA, 50 bp, synthetic construct; identical to SEQ ID NO: 4055
  misc_feature 1..50: note = Probe
  source 1..50: mol_type = other DNA

SEQ ID NO: 46008 - DNA, 18 bp, synthetic construct
  misc_feature 1..18: note = Probe
  source 1..18: mol_type = other DNA
caatccccggcacctcca

SEQ ID NO: 46009 - DNA, 40 bp, synthetic construct
  misc_feature 1..40: note = Probe
  source 1..40: mol_type = other DNA
caatggggtttccccgcacaggttcgaatcctgttcgtga

SEQ ID NO: 46010 - DNA, 38 bp, synthetic construct; identical to SEQ ID NO: 4060
  misc_feature 1..38: note = Probe
  source 1..38: mol_type = other DNA

SEQ ID NO: 46011 - DNA, 39 bp, synthetic construct; identical to SEQ ID NO: 4061
  misc_feature 1..39: note = Probe
  source 1..39: mol_type = other DNA

SEQ ID NO: 46012 - DNA, 21 bp, synthetic construct
  misc_feature 1..21: note = Probe
  source 1..21: mol_type = other DNA
caattcccggtcagggaacca

SEQ ID NO: 46013 - DNA, 16 bp, synthetic construct
  misc_feature 1..16: note = Probe
  source 1..16: mol_type = other DNA
cacaaagcacccaact

SEQ ID NO: 46014 - DNA, 20 bp, synthetic construct
  misc_feature 1..20: note = Probe
  source 1..20: mol_type = other DNA
cacaaagcacccaacttaca

SEQ ID NO: 46015 - DNA, 30 bp, synthetic construct
  misc_feature 1..30: note = Probe
  source 1..30: mol_type = other DNA
cacaaagcacccaacttacacttaggagat

SEQ ID NO: 46016 - DNA, 31 bp, synthetic construct; identical to SEQ ID NO: 4074
  misc_feature 1..31: note = Probe
  source 1..31: mol_type = other DNA

SEQ ID NO: 46017 - DNA, 39 bp, synthetic construct; identical to SEQ ID NO: 4080
  misc_feature 1..39: note = Probe
  source 1..39: mol_type = other DNA

SEQ ID NO: 46018 - DNA, 42 bp, synthetic construct
  misc_feature 1..42: note = Probe
  source 1..42: mol_type = other DNA
cacaaagcacccaacttacacttaggagatttcaacttaact

SEQ ID NO: 46019 - DNA, 46 bp, synthetic construct; identical to SEQ ID NO: 4082
  misc_feature 1..46: note = Probe
  source 1..46: mol_type = other DNA

SEQ ID NO: 46020 - DNA, 48 bp, synthetic construct; identical to SEQ ID NO: 4084
  misc_feature 1..48: note = Probe
  source 1..48: mol_type = other DNA

SEQ ID NO: 46021 - DNA, 18 bp, synthetic construct
  misc_feature 1..18: note = Probe
  source 1..18: mol_type = other DNA
cacaagaactgctaactc

SEQ ID NO: 46022 - DNA, 21 bp, synthetic construct
  misc_feature 1..21: note = Probe
  source 1..21: mol_type = other DNA
cacaagaactgctaactcatg

SEQ ID NO: 46023 - DNA, 23 bp, synthetic construct
  misc_feature 1..23: note = Probe
  source 1..23: mol_type = other DNA
cacaagaactgctaactcatgcc

SEQ ID NO: 46024 - DNA, 24 bp, synthetic construct
  misc_feature 1..24: note = Probe
  source 1..24: mol_type = other DNA
cacaagaactgctaactcatgccc

SEQ ID NO: 46025 - DNA, 31 bp, synthetic construct; identical to SEQ ID NO: 4089
  misc_feature 1..31: note = Probe
  source 1..31: mol_type = other DNA

SEQ ID NO: 46026 - DNA, 32 bp, synthetic construct; identical to SEQ ID NO: 4090
  misc_feature 1..32: note = Probe
  source 1..32: mol_type = other DNA

SEQ ID NO: 46027 - DNA, 36 bp, synthetic construct; identical to SEQ ID NO: 25120
  misc_feature 1..36: note = Probe
  source 1..36: mol_type = other DNA

SEQ ID NO: 46028 - DNA, 44 bp, synthetic construct; identical to SEQ ID NO: 463
  misc_feature 1..44: note = Probe
  source 1..44: mol_type = other DNA

SEQ ID NO: 46029 - DNA, 49 bp, synthetic construct; identical to SEQ ID NO: 4093
  misc_feature 1..49: note = Probe
  source 1..49: mol_type = other DNA

SEQ ID NO: 46030 - DNA, 18 bp, synthetic construct
  misc_feature 1..18: note = Probe
  source 1..18: mol_type = other DNA
cacacccacccaagaaca

SEQ ID NO: 46031 - DNA, 19 bp, synthetic construct
  misc_feature 1..19: note = Probe
  source 1..19: mol_type = other DNA
cacacccacccaagaacag

SEQ ID NO: 46032 - DNA, 20 bp, synthetic construct
  misc_feature 1..20: note = Probe
  source 1..20: mol_type = other DNA
cacacccacccaagaacagg

SEQ ID NO: 46033 - DNA, 25 bp, synthetic construct
  misc_feature 1..25: note = Probe
  source 1..25: mol_type = other DNA
cacacccacccaagaacagggtttg

SEQ ID NO: 46034 - DNA, 27 bp, synthetic construct
  misc_feature 1..27: note = Probe
  source 1..27: mol_type = other DNA
cacacccacccaagaacagggtttgtt

SEQ ID NO: 46035 - DNA, 28 bp, synthetic construct
  misc_feature 1..28: note = Probe
  source 1..28: mol_type = other DNA
cacacccacccaagaacagggtttgtta

SEQ ID NO: 46036 - DNA, 31 bp, synthetic construct
  misc_feature 1..31: note = Probe
  source 1..31: mol_type = other DNA
cacacccacccaagaacagggtttgttaaga

SEQ ID NO: 46037 - DNA, 21 bp, synthetic construct
  misc_feature 1..21: note = Probe
  source 1..21: mol_type = other DNA
cacacgcgaaaggtccccggt

SEQ ID NO: 46038 - DNA, 36 bp, synthetic construct
  misc_feature 1..36: note = Probe
  source 1..36: mol_type = other DNA
cacacgcgaaaggtccccggttcgaaaccgggcgga

SEQ ID NO: 46039 - DNA, 43 bp, synthetic construct
  misc_feature 1..43: note = Probe
  source 1..43: mol_type = other DNA
cacacgcgaaaggtccccggttcgaaaccgggcggaaacacct

SEQ ID NO: 46040 - DNA, 20 bp, synthetic construct
  misc_feature 1..20: note = Probe
  source 1..20: mol_type = other DNA
cacacggggcacaataattt

SEQ ID NO: 46041 - DNA, 21 bp, synthetic construct
  misc_feature 1..21: note = Probe
  source 1..21: mol_type = other DNA
cacactactataaccacccta

SEQ ID NO: 46042 - DNA, 16 bp, synthetic construct
  misc_feature 1..16: note = Probe
  source 1..16: mol_type = other DNA
cacatcaccccataaa

SEQ ID NO: 46043 - DNA, 17 bp, synthetic construct
  misc_feature 1..17: note = Probe
  source 1..17: mol_type = other DNA
cacatcaccccataaac

SEQ ID NO: 46044 - DNA, 18 bp, synthetic construct
  misc_feature 1..18: note = Probe
  source 1..18: mol_type = other DNA
cacatcaccccataaaca

SEQ ID NO: 46045 - DNA, 20 bp, synthetic construct
  misc_feature 1..20: note = Probe
  source 1..20: mol_type = other DNA
cacatcaccccataaacaaa

SEQ ID NO: 46046 - DNA, 21 bp, synthetic construct
  misc_feature 1..21: note = Probe
  source 1..21: mol_type = other DNA
cacatcaccccataaacaaat

SEQ ID NO: 46047 - DNA, 50 bp, synthetic construct
  misc_feature 1..50: note = Probe
  source 1..50: mol_type = other DNA
caccagtcttgtaaaccggagatgaaaacctttttccaaggacaaatcag

SEQ ID NO: 46048 - DNA, 18 bp, synthetic construct
  misc_feature 1..18: note = Probe
  source 1..18: mol_type = other DNA
cacccaacttacacttag

SEQ ID NO: 46049 - DNA, 20 bp, synthetic construct
  misc_feature 1..20: note = Probe
  source 1..20: mol_type = other DNA
cacccaacttacacttagga

SEQ ID NO: 46050 - DNA, 21 bp, synthetic construct
  misc_feature 1..21: note = Probe
  source 1..21: mol_type = other DNA
cacccaacttacacttaggag

SEQ ID NO: 46051 - DNA, 22 bp, synthetic construct
  misc_feature 1..22: note = Probe
  source 1..22: mol_type = other DNA
cacccaacttacacttaggaga

SEQ ID NO: 46052 - DNA, 23 bp, synthetic construct
  misc_feature 1..23: note = Probe
  source 1..23: mol_type = other DNA
cacccaacttacacttaggagat

SEQ ID NO: 46053 - DNA, 27 bp, synthetic construct
  misc_feature 1..27: note = Probe
  source 1..27: mol_type = other DNA
cacccaacttacacttaggagatttca

SEQ ID NO: 46054 - DNA, 36 bp, synthetic construct; identical to SEQ ID NO: 29292
  misc_feature 1..36: note = Probe
  source 1..36: mol_type = other DNA

SEQ ID NO: 46055 - DNA, 37 bp, synthetic construct
  misc_feature 1..37: note = Probe
  source 1..37: mol_type = other DNA
cacccaacttacacttaggagatttcaacttaacttg

SEQ ID NO: 46056 - DNA, 39 bp, synthetic construct; identical to SEQ ID NO: 4110
  misc_feature 1..39: note = Probe
  source 1..39: mol_type = other DNA

SEQ ID NO: 46057 - DNA, 40 bp, synthetic construct
  misc_feature 1..40: note = Probe
  source 1..40: mol_type = other DNA
cacccaacttacacttaggagatttcaacttaacttgacc

SEQ ID NO: 46058 - DNA, 41 bp, synthetic construct; identical to SEQ ID NO: 4111
  misc_feature 1..41: note = Probe
  source 1..41: mol_type = other DNA

SEQ ID NO: 46059 - DNA, 42 bp, synthetic construct
  misc_feature 1..42: note = Probe
  source 1..42: mol_type = other DNA
cacccaacttacacttaggagatttcaacttaacttgaccgc

SEQ ID NO: 46060 - DNA, 43 bp, synthetic construct
  misc_feature 1..43: note = Probe
  source 1..43: mol_type = other DNA
cacccaacttacacttaggagatttcaacttaacttgaccgct

SEQ ID NO: 46061 - DNA, 44 bp, synthetic construct; identical to SEQ ID NO: 29293
  misc_feature 1..44: note = Probe
  source 1..44: mol_type = other DNA

SEQ ID NO: 46062 - DNA, 45 bp, synthetic construct; identical to SEQ ID NO: 29294
  misc_feature 1..45: note = Probe
  source 1..45: mol_type = other DNA

SEQ ID NO: 46063 - DNA, 46 bp, synthetic construct
  misc_feature 1..46: note = Probe
  source 1..46: mol_type = other DNA
cacccaacttacacttaggagatttcaacttaacttgaccgctctg

SEQ ID NO: 46064 - DNA, 48 bp, synthetic construct; identical to SEQ ID NO: 4112
  misc_feature 1..48: note = Probe
  source 1..48: mol_type = other DNA

SEQ ID NO: 46065 - DNA, 49 bp, synthetic construct; identical to SEQ ID NO: 4113
  misc_feature 1..49: note = Probe
  source 1..49: mol_type = other DNA

SEQ ID NO: 46066 - DNA, 50 bp, synthetic construct; identical to SEQ ID NO: 4114
  misc_feature 1..50: note = Probe
  source 1..50: mol_type = other DNA

SEQ ID NO: 46067 - DNA, 26 bp, synthetic construct
  misc_feature 1..26: note = Probe
  source 1..26: mol_type = other DNA
cacccacccaagaacagggtttgtta

SEQ ID NO: 46068 - DNA, 21 bp, synthetic construct
  misc_feature 1..21: note = Probe
  source 1..21: mol_type = other DNA
cacctcagaaggtctcacttt

SEQ ID NO: 46069 - DNA, 22 bp, synthetic construct
  misc_feature 1..22: note = Probe
  source 1..22: mol_type = other DNA
cacctcagaaggtctcactttt

SEQ ID NO: 46070 - DNA, 23 bp, synthetic construct
  misc_feature 1..23: note = Probe
  source 1..23: mol_type = other DNA
cacgcagaaggtcctgggttcga

SEQ ID NO: 46071 - DNA, 36 bp, synthetic construct; identical to SEQ ID NO: 29340
  misc_feature 1..36: note = Probe
  source 1..36: mol_type = other DNA

SEQ ID NO: 46072 - DNA, 37 bp, synthetic construct; identical to SEQ ID NO: 36357
  misc_feature 1..37: note = Probe
  source 1..37: mol_type = other DNA

SEQ ID NO: 46073 - DNA, 39 bp, synthetic construct
  misc_feature 1..39: note = Probe
  source 1..39: mol_type = other DNA
cacgcagaaggtcctgggttcgagccccagtggaaccac

SEQ ID NO: 46074 - DNA, 40 bp, synthetic construct; identical to SEQ ID NO: 4121
  misc_feature 1..40: note = Probe
  source 1..40: mol_type = other DNA

SEQ ID NO: 46075 - DNA, 41 bp, synthetic construct; identical to SEQ ID NO: 4122
  misc_feature 1..41: note = Probe
  source 1..41: mol_type = other DNA

SEQ ID NO: 46076 - DNA, 50 bp, synthetic construct
  misc_feature 1..50: note = Probe
  source 1..50: mol_type = other DNA
cacgcagaaggtcctgggttcgagccccagtggaaccacggcgtgattca

SEQ ID NO: 46077 - DNA, 50 bp, synthetic construct
  misc_feature 1..50: note = Probe
  source 1..50: mol_type = other DNA
cacgcagaaggtcctgggttcgagccccagtggaaccatagccgtaaggc

SEQ ID NO: 46078 - DNA, 16 bp, synthetic construct
  misc_feature 1..16: note = Probe
  source 1..16: mol_type = other DNA
cacgcgaaaggtcccc

SEQ ID NO: 46079 - DNA, 17 bp, synthetic construct
  misc_feature 1..17: note = Probe
  source 1..17: mol_type = other DNA
cacgcgaaaggtccccg

SEQ ID NO: 46080 - DNA, 19 bp, synthetic construct
  misc_feature 1..19: note = Probe
  source 1..19: mol_type = other DNA
cacgcgaaaggtccccggt

SEQ ID NO: 46081 - DNA, 23 bp, synthetic construct
  misc_feature 1..23: note = Probe
  source 1..23: mol_type = other DNA
cacgcgaaaggtccccggttcga

SEQ ID NO: 46082 - DNA, 38 bp, synthetic construct
  misc_feature 1..38: note = Probe
  source 1..38: mol_type = other DNA
cacgcgaaaggtccccggttcgaaaccgggcggaaaca

SEQ ID NO: 46083 - DNA, 41 bp, synthetic construct
  misc_feature 1..41: note = Probe
  source 1..41: mol_type = other DNA
cacgcgaaaggtccccggttcgaaaccgggcggaaacacct

SEQ ID NO: 46084 - DNA, 41 bp, synthetic construct
  misc_feature 1..41: note = Probe
  source 1..41: mol_type = other DNA
cacgcgaaaggtccccggttcgatcccgggcggaaacaggt

SEQ ID NO: 46085 - DNA, 18 bp, synthetic construct
  misc_feature 1..18: note = Probe
  source 1..18: mol_type = other DNA
cacgcgggagaccggggt

SEQ ID NO: 46086 - DNA, 32 bp, synthetic construct; identical to SEQ ID NO: 475
  misc_feature 1..32: note = Probe
  source 1..32: mol_type = other DNA

SEQ ID NO: 46087 - DNA, 33 bp, synthetic construct; identical to SEQ ID NO: 476
  misc_feature 1..33: note = Probe
  source 1..33: mol_type = other DNA

SEQ ID NO: 46088 - DNA, 34 bp, synthetic construct; identical to SEQ ID NO: 4128
  misc_feature 1..34: note = Probe
  source 1..34: mol_type = other DNA

SEQ ID NO: 46089 - DNA, 35 bp, synthetic construct; identical to SEQ ID NO: 17774
  misc_feature 1..35: note = Probe
  source 1..35: mol_type = other DNA

SEQ ID NO: 46090 - DNA, 38 bp, synthetic construct; identical to SEQ ID NO: 4129
  misc_feature 1..38: note = Probe
  source 1..38: mol_type = other DNA

SEQ ID NO: 46091 - DNA, 39 bp, synthetic construct; identical to SEQ ID NO: 4130
  misc_feature 1..39: note = Probe
  source 1..39: mol_type = other DNA

SEQ ID NO: 46092 - DNA, 40 bp, synthetic construct; identical to SEQ ID NO: 4131
  misc_feature 1..40: note = Probe
  source 1..40: mol_type = other DNA

SEQ ID NO: 46093 - DNA, 41 bp, synthetic construct; identical to SEQ ID NO: 4132
  misc_feature 1..41: note = Probe
  source 1..41: mol_type = other DNA

SEQ ID NO: 46094 - DNA, 21 bp, synthetic construct
  misc_feature 1..21: note = Probe
  source 1..21: mol_type = other DNA
cacgcgggagaccggggttcg

SEQ ID NO: 46095 - DNA, 40 bp, synthetic construct
  misc_feature 1..40: note = Probe
  source 1..40: mol_type = other DNA
cacgcgggagaccggggttcgattccccaacggggaggct

SEQ ID NO: 46096 - DNA, 38 bp, synthetic construct; identical to SEQ ID NO: 4137
  misc_feature 1..38: note = Probe
  source 1..38: mol_type = other DNA

SEQ ID NO: 46097 - DNA, 39 bp, synthetic construct; identical to SEQ ID NO: 4138
  misc_feature 1..39: note = Probe
  source 1..39: mol_type = other DNA

SEQ ID NO: 46098 - DNA, 40 bp, synthetic construct; identical to SEQ ID NO: 4139
  misc_feature 1..40: note = Probe
  source 1..40: mol_type = other DNA

SEQ ID NO: 46099 - DNA, 41 bp, synthetic construct; identical to SEQ ID NO: 4140
  misc_feature 1..41: note = Probe
  source 1..41: mol_type = other DNA

SEQ ID NO: 46100 - DNA, 48 bp, synthetic construct; identical to SEQ ID NO: 4142
  misc_feature 1..48: note = Probe
  source 1..48: mol_type = other DNA

SEQ ID NO: 46101 - DNA, 50 bp, synthetic construct; identical to SEQ ID NO: 4143
  misc_feature 1..50: note = Probe
  source 1..50: mol_type = other DNA

SEQ ID NO: 46102 - DNA, 39 bp, synthetic construct; identical to SEQ ID NO: 4144
  misc_feature 1..39: note = Probe
  source 1..39: mol_type = other DNA

SEQ ID NO: 46103 - DNA, 40 bp, synthetic construct; identical to SEQ ID NO: 4145
  misc_feature 1..40: note = Probe
  source 1..40: mol_type = other DNA

SEQ ID NO: 46104 - DNA, 39 bp, synthetic construct; identical to SEQ ID NO: 4146
  misc_feature 1..39: note = Probe
  source 1..39: mol_type = other DNA

SEQ ID NO: 46105 - DNA, 40 bp, synthetic construct; identical to SEQ ID NO: 4147
  misc_feature 1..40: note = Probe
  source 1..40: mol_type = other DNA

SEQ ID NO: 46106 - DNA, 41 bp, synthetic construct; identical to SEQ ID NO: 4148
  misc_feature 1..41: note = Probe
  source 1..41: mol_type = other DNA

SEQ ID NO: 46107 - DNA, 38 bp, synthetic construct; identical to SEQ ID NO: 4149
  misc_feature 1..38: note = Probe
  source 1..38: mol_type = other DNA

SEQ ID NO: 46108 - DNA, 39 bp, synthetic construct; identical to SEQ ID NO: 4150
  misc_feature 1..39: note = Probe
  source 1..39: mol_type = other DNA

SEQ ID NO: 46109 - DNA, 50 bp, synthetic construct; identical to SEQ ID NO: 4153
  misc_feature 1..50: note = Probe
  source 1..50: mol_type = other DNA

SEQ ID NO: 46110 - DNA, 39 bp, synthetic construct; identical to SEQ ID NO: 4154
  misc_feature 1..39: note = Probe
  source 1..39: mol_type = other DNA

SEQ ID NO: 46111 - DNA, 40 bp, synthetic construct; identical to SEQ ID NO: 4155
  misc_feature 1..40: note = Probe
  source 1..40: mol_type = other DNA

SEQ ID NO: 46112 - DNA, 41 bp, synthetic construct; identical to SEQ ID NO: 4156
  misc_feature 1..41: note = Probe
  source 1..41: mol_type = other DNA

SEQ ID NO: 46113 - DNA, 46 bp, synthetic construct; identical to SEQ ID NO: 4158
  misc_feature 1..46: note = Probe
  source 1..46: mol_type = other DNA

SEQ ID NO: 46114 - DNA, 47 bp, synthetic construct; identical to SEQ ID NO: 4159
  misc_feature 1..47: note = Probe
  source 1..47: mol_type = other DNA

SEQ ID NO: 46115 - DNA, 48 bp, synthetic construct; identical to SEQ ID NO: 4160
  misc_feature 1..48: note = Probe
  source 1..48: mol_type = other DNA

SEQ ID NO: 46116 - DNA, 50 bp, synthetic construct; identical to SEQ ID NO: 4162
  misc_feature 1..50: note = Probe
  source 1..50: mol_type = other DNA

SEQ ID NO: 46117 - DNA, 41 bp, synthetic construct; identical to SEQ ID NO: 4163
  misc_feature 1..41: note = Probe
  source 1..41: mol_type = other DNA

SEQ ID NO: 46118 - DNA, 46 bp, synthetic construct
  misc_feature 1..46: note = Probe
  source 1..46: mol_type = other DNA
cacgcgggagaccggggttcgattccccgacggggaggcagccgtg

SEQ ID NO: 46119 - DNA, 50 bp, synthetic construct
  misc_feature 1..50: note = Probe
  source 1..50: mol_type = other DNA
cacgcgggagaccggggttcgattccccgacggggaggcagccgtgcttt

SEQ ID NO: 46120 - DNA, 40 bp, synthetic construct; identical to SEQ ID NO: 4165
  misc_feature 1..40: note = Probe
  source 1..40: mol_type = other DNA

SEQ ID NO: 46121 - DNA, 41 bp, synthetic construct; identical to SEQ ID NO: 4166
  misc_feature 1..41: note = Probe
  source 1..41: mol_type = other DNA

SEQ ID NO: 46122 - DNA, 42 bp, synthetic construct; identical to SEQ ID NO: 4167
  misc_feature 1..42: note = Probe
  source 1..42: mol_type = other DNA

SEQ ID NO: 46123 - DNA, 43 bp, synthetic construct; identical to SEQ ID NO: 4168
  misc_feature 1..43: note = Probe
  source 1..43: mol_type = other DNA

SEQ ID NO: 46124 - DNA, 28 bp, synthetic construct
  misc_feature 1..28: note = Probe
  source 1..28: mol_type = other DNA
cacgcgtgggttcgaatcccatcctcgt

SEQ ID NO: 46125 - DNA, 18 bp, synthetic construct
  misc_feature 1..18: note = Probe
  source 1..18: mol_type = other DNA
cacggggcacaataattt

SEQ ID NO: 46126 - DNA, 19 bp, synthetic construct
  misc_feature 1..19: note = Probe
  source 1..19: mol_type = other DNA
cactactataaccacccta

SEQ ID NO: 46127 - DNA, 50 bp, synthetic construct; identical to SEQ ID NO: 4176
  misc_feature 1..50: note = Probe
  source 1..50: mol_type = other DNA

SEQ ID NO: 46128 - DNA, 43 bp, synthetic construct
  misc_feature 1..43: note = Probe
  source 1..43: mol_type = other DNA
cactgaaaatgtttagacgggctcacatcaccccataaacaaa

SEQ ID NO: 46129 - DNA, 16 bp, synthetic construct
  misc_feature 1..16: note = Probe
  source 1..16: mol_type = other DNA
cactgtaaagctaact

SEQ ID NO: 46130 - DNA, 26 bp, synthetic construct
  misc_feature 1..26: note = Probe
  source 1..26: mol_type = other DNA
cactgtaaagctaacttagcattaac

SEQ ID NO: 46131 - DNA, 29 bp, synthetic construct
  misc_feature 1..29: note = Probe
  source 1..29: mol_type = other DNA
cactgtaaagctaacttagcattaacctt

SEQ ID NO: 46132 - DNA, 31 bp, synthetic construct; identical to SEQ ID NO: 494
  misc_feature 1..31: note = Probe
  source 1..31: mol_type = other DNA

SEQ ID NO: 46133 - DNA, 32 bp, synthetic construct; identical to SEQ ID NO: 495
  misc_feature 1..32: note = Probe
  source 1..32: mol_type = other DNA

SEQ ID NO: 46134 - DNA, 33 bp, synthetic construct; identical to SEQ ID NO: 4180
  misc_feature 1..33: note = Probe
  source 1..33: mol_type = other DNA

SEQ ID NO: 46135 - DNA, 34 bp, synthetic construct; identical to SEQ ID NO: 496
  misc_feature 1..34: note = Probe
  source 1..34: mol_type = other DNA

SEQ ID NO: 46136 - DNA, 35 bp, synthetic construct; identical to SEQ ID NO: 497
  misc_feature 1..35: note = Probe
  source 1..35: mol_type = other DNA

SEQ ID NO: 46137 - DNA, 36 bp, synthetic construct; identical to SEQ ID NO: 498
  misc_feature 1..36: note = Probe
  source 1..36: mol_type = other DNA

SEQ ID NO: 46138 - DNA, 37 bp, synthetic construct; identical to SEQ ID NO: 4181
  misc_feature 1..37: note = Probe
  source 1..37: mol_type = other DNA

SEQ ID NO: 46139 - DNA, 38 bp, synthetic construct; identical to SEQ ID NO: 17810
  misc_feature 1..38: note = Probe
  source 1..38: mol_type = other DNA

SEQ ID NO: 46140 - DNA, 39 bp, synthetic construct; identical to SEQ ID NO: 499
  misc_feature 1..39: note = Probe
  source 1..39: mol_type = other DNA

SEQ ID NO: 46141 - DNA, 40 bp, synthetic construct; identical to SEQ ID NO: 4182
  misc_feature 1..40: note = Probe
  source 1..40: mol_type = other DNA

SEQ ID NO: 46142 - DNA, 41 bp, synthetic construct; identical to SEQ ID NO: 500
  misc_feature 1..41: note = Probe
  source 1..41: mol_type = other DNA

SEQ ID NO: 46143 - DNA, 42 bp, synthetic construct; identical to SEQ ID NO: 4183
  misc_feature 1..42: note = Probe
  source 1..42: mol_type = other DNA

SEQ ID NO: 46144 - DNA, 43 bp, synthetic construct; identical to SEQ ID NO: 501
  misc_feature 1..43: note = Probe
  source 1..43: mol_type = other DNA

SEQ ID NO: 46145 - DNA, 44 bp, synthetic construct; identical to SEQ ID NO: 4184
  misc_feature 1..44: note = Probe
  source 1..44: mol_type = other DNA

SEQ ID NO: 46146 - DNA, 48 bp, synthetic construct; identical to SEQ ID NO: 4186
  misc_feature 1..48: note = Probe
  source 1..48: mol_type = other DNA

SEQ ID NO: 46147 - DNA, 49 bp, synthetic construct; identical to SEQ ID NO: 4187
  misc_feature 1..49: note = Probe
  source 1..49: mol_type = other DNA

SEQ ID NO: 46148 - DNA, 26 bp, synthetic construct
  misc_feature 1..26: note = Probe
  source 1..26: mol_type = other DNA
cacttaggagatttcaacttaacttg

SEQ ID NO: 46149 - DNA, 28 bp, synthetic construct
  misc_feature 1..28: note = Probe
  source 1..28: mol_type = other DNA
cacttaggagatttcaacttaacttgac

SEQ ID NO: 46150 - DNA, 29 bp, synthetic construct
  misc_feature 1..29: note = Probe
  source 1..29: mol_type = other DNA
cacttaggagatttcaacttaacttgacc

SEQ ID NO: 46151 - DNA, 30 bp, synthetic construct; identical to SEQ ID NO: 4195
  misc_feature 1..30: note = Probe
  source 1..30: mol_type = other DNA

SEQ ID NO: 46152 - DNA, 31 bp, synthetic construct; identical to SEQ ID NO: 4196
  misc_feature 1..31: note = Probe
  source 1..31: mol_type = other DNA

SEQ ID NO: 46153 - DNA, 32 bp, synthetic construct; identical to SEQ ID NO: 4197
  misc_feature 1..32: note = Probe
  source 1..32: mol_type = other DNA

SEQ ID NO: 46154 - DNA, 34 bp, synthetic construct; identical to SEQ ID NO: 4199
  misc_feature 1..34: note = Probe
  source 1..34: mol_type = other DNA

SEQ ID NO: 46155 - DNA, 35 bp, synthetic construct; identical to SEQ ID NO: 4200
  misc_feature 1..35: note = Probe
  source 1..35: mol_type = other DNA

SEQ ID NO: 46156 - DNA, 36 bp, synthetic construct; identical to SEQ ID NO: 4201
  misc_feature 1..36: note = Probe
  source 1..36: mol_type = other DNA

SEQ ID NO: 46157 - DNA, 37 bp, synthetic construct; identical to SEQ ID NO: 4202
  misc_feature 1..37: note = Probe
  source 1..37: mol_type = other DNA

SEQ ID NO: 46158 - DNA, 38 bp, synthetic construct; identical to SEQ ID NO: 4203
  misc_feature 1..38: note = Probe
  source 1..38: mol_type = other DNA

SEQ ID NO: 46159 - DNA, 39 bp, synthetic construct; identical to SEQ ID NO: 4204
  misc_feature 1..39: note = Probe
  source 1..39: mol_type = other DNA

SEQ ID NO: 46160 - DNA, 40 bp, synthetic construct; identical to SEQ ID NO: 4205
  misc_feature 1..40: note = Probe
  source 1..40: mol_type = other DNA

SEQ ID NO: 46161 - DNA, 41 bp, synthetic construct; identical to SEQ ID NO: 4206
  misc_feature 1..41: note = Probe
  source 1..41: mol_type = other DNA

SEQ ID NO: 46162 - DNA, 31 bp, synthetic construct; identical to SEQ ID NO: 4215
  misc_feature 1..31: note = Probe
  source 1..31: mol_type = other DNA

SEQ ID NO: 46163 - DNA, 34 bp, synthetic construct; identical to SEQ ID NO: 4217
  misc_feature 1..34: note = Probe
  source 1..34: mol_type = other DNA

SEQ ID NO: 46164 - DNA, 32 bp, synthetic construct; identical to SEQ ID NO: 4220
  misc_feature 1..32: note = Probe
  source 1..32: mol_type = other DNA

SEQ ID NO: 46165 - DNA, 31 bp, synthetic construct; identical to SEQ ID NO: 17836
  misc_feature 1..31: note = Probe
  source 1..31: mol_type = other DNA

SEQ ID NO: 46166 - DNA, 36 bp, synthetic construct; identical to SEQ ID NO: 4221
  misc_feature 1..36: note = Probe
  source 1..36: mol_type = other DNA

SEQ ID NO: 46167 - DNA, 37 bp, synthetic construct; identical to SEQ ID NO: 4222
  misc_feature 1..37: note = Probe
  source 1..37: mol_type = other DNA

SEQ ID NO: 46168 - DNA, 37 bp, synthetic construct
  misc_feature 1..37: note = Probe
  source 1..37: mol_type = other DNA
cagaaggttgcgtgttcaaatcacgtcggggtcaaac

SEQ ID NO: 46169 - DNA, 37 bp, synthetic construct
  misc_feature 1..37: note = Probe
  source 1..37: mol_type = other DNA
cagaaggttgcgtgttcaaatcacgtcggggtcaaca

SEQ ID NO: 46170 - DNA, 33 bp, synthetic construct
  misc_feature 1..33: note = Probe
  source 1..33: mol_type = other DNA
cagaaggttgcgtgttcaagtcacgtcggggtc

SEQ ID NO: 46171 - DNA, 16 bp, synthetic construct
  misc_feature 1..16: note = Probe
  source 1..16: mol_type = other DNA
cagaccaagagccttc

SEQ ID NO: 46172 - DNA, 49 bp, synthetic construct; identical to SEQ ID NO: 4227
  misc_feature 1..49: note = Probe
  source 1..49: mol_type = other DNA

SEQ ID NO: 46173 - DNA, 50 bp, synthetic construct; identical to SEQ ID NO: 514
  misc_feature 1..50: note = Probe
  source 1..50: mol_type = other DNA

SEQ ID NO: 46174 - DNA, 18 bp, synthetic construct
  misc_feature 1..18: note = Probe
  source 1..18: mol_type = other DNA
cagagaatagtttaaatt

SEQ ID NO: 46175 - DNA, 20 bp, synthetic construct
  misc_feature 1..20: note = Probe
  source 1..20: mol_type = other DNA
cagagaatagtttaaattag

SEQ ID NO: 46176 - DNA, 25 bp, synthetic construct
  misc_feature 1..25: note = Probe
  source 1..25: mol_type = other DNA
cagagaatagtttaaattagaatct

SEQ ID NO: 46177 - DNA, 27 bp, synthetic construct
  misc_feature 1..27: note = Probe
  source 1..27: mol_type = other DNA
cagagaatagtttaaattagaatctta

SEQ ID NO: 46178 - DNA, 28 bp, synthetic construct
  misc_feature 1..28: note = Probe
  source 1..28: mol_type = other DNA
cagagaatagtttaaattagaatcttag

SEQ ID NO: 46179 - DNA, 29 bp, synthetic construct
  misc_feature 1..29: note = Probe
  source 1..29: mol_type = other DNA
cagagaatagtttaaattagaatcttagc

SEQ ID NO: 46180 - DNA, 31 bp, synthetic construct; identical to SEQ ID NO: 520
  misc_feature 1..31: note = Probe
  source 1..31: mol_type = other DNA

SEQ ID NO: 46181 - DNA, 33 bp, synthetic construct; identical to SEQ ID NO: 522
  misc_feature 1..33: note = Probe
  source 1..33: mol_type = other DNA

SEQ ID NO: 46182 - DNA, 34 bp, synthetic construct; identical to SEQ ID NO: 523
  misc_feature 1..34: note = Probe
  source 1..34: mol_type = other DNA

SEQ ID NO: 46183 - DNA, 35 bp, synthetic construct; identical to SEQ ID NO: 4232
  misc_feature 1..35: note = Probe
  source 1..35: mol_type = other DNA

SEQ ID NO: 46184 - DNA, 36 bp, synthetic construct; identical to SEQ ID NO: 4233
  misc_feature 1..36: note = Probe
  source 1..36: mol_type = other DNA

SEQ ID NO: 46185 - DNA, 37 bp, synthetic construct; identical to SEQ ID NO: 4234
  misc_feature 1..37: note = Probe
  source 1..37: mol_type = other DNA

SEQ ID NO: 46186 - DNA, 38 bp, synthetic construct; identical to SEQ ID NO: 4235
  misc_feature 1..38: note = Probe
  source 1..38: mol_type = other DNA

SEQ ID NO: 46187 - DNA, 39 bp, synthetic construct; identical to SEQ ID NO: 4236
  misc_feature 1..39: note = Probe
  source 1..39: mol_type = other DNA

SEQ ID NO: 46188 - DNA, 40 bp, synthetic construct; identical to SEQ ID NO: 524
  misc_feature 1..40: note = Probe
  source 1..40: mol_type = other DNA

SEQ ID NO: 46189 - DNA, 50 bp, synthetic construct; identical to SEQ ID NO: 526
  misc_feature 1..50: note = Probe
  source 1..50: mol_type = other DNA

SEQ ID NO: 46190 - DNA, 18 bp, synthetic construct
  misc_feature 1..18: note = Probe
  source 1..18: mol_type = other DNA
cagagcccggtaatcgca

SEQ ID NO: 46191 - DNA, 21 bp, synthetic construct
  misc_feature 1..21: note = Probe
  source 1..21: mol_type = other DNA
cagagcccggtaatcgcataa

SEQ ID NO: 46192 - DNA, 27 bp, synthetic construct
  misc_feature 1..27: note = Probe
  source 1..27: mol_type = other DNA
cagagcccggtaatcgcataaaactta

SEQ ID NO: 46193 - DNA, 32 bp, synthetic construct; identical to SEQ ID NO: 17870
  misc_feature 1..32: note = Probe
  source 1..32: mol_type = other DNA

SEQ ID NO: 46194 - DNA, 37 bp, synthetic construct
  misc_feature 1..37: note = Probe
  source 1..37: mol_type = other DNA
cagagcccggtaatcgcataaaacttaaaactttaca

SEQ ID NO: 46195 - DNA, 40 bp, synthetic construct
  misc_feature 1..40: note = Probe
  source 1..40: mol_type = other DNA
cagagcccggtaatcgcataaaacttaaaactttacagtc

SEQ ID NO: 46196 - DNA, 44 bp, synthetic construct
  misc_feature 1..44: note = Probe
  source 1..44: mol_type = other DNA
cagagcccggtaatcgcataaaacttaaaactttacagtcagag

SEQ ID NO: 46197 - DNA, 50 bp, synthetic construct; identical to SEQ ID NO: 4242
  misc_feature 1..50: note = Probe
  source 1..50: mol_type = other DNA

SEQ ID NO: 46198 - DNA, 26 bp, synthetic construct
  misc_feature 1..26: note = Probe
  source 1..26: mol_type = other DNA
cagaggcttacgaccccttatttacc

SEQ ID NO: 46199 - DNA, 27 bp, synthetic construct
  misc_feature 1..27: note = Probe
  source 1..27: mol_type = other DNA
cagaggcttacgaccccttatttaccg

SEQ ID NO: 46200 - DNA, 25 bp, synthetic construct
  misc_feature 1..25: note = Probe
  source 1..25: mol_type = other DNA
cagagtggggttttgcagtccttag

SEQ ID NO: 46201 - DNA, 27 bp, synthetic construct
  misc_feature 1..27: note = Probe
  source 1..27: mol_type = other DNA
cagagtggggttttgcagtccttagct

SEQ ID NO: 46202 - DNA, 18 bp, synthetic construct
  misc_feature 1..18: note = Probe
  source 1..18: mol_type = other DNA
cagagtgtagcttaacac

SEQ ID NO: 46203 - DNA, 19 bp, synthetic construct
  misc_feature 1..19: note = Probe
  source 1..19: mol_type = other DNA
cagagtgtagcttaacaca

SEQ ID NO: 46204 - DNA, 21 bp, synthetic construct
  misc_feature 1..21: note = Probe
  source 1..21: mol_type = other DNA
cagagtgtagcttaacacaaa

SEQ ID NO: 46205 - DNA, 23 bp, synthetic construct
  misc_feature 1..23: note = Probe
  source 1..23: mol_type = other DNA
cagagtgtagcttaacacaaagc

SEQ ID NO: 46206 - DNA, 24 bp, synthetic construct
  misc_feature 1..24: note = Probe
  source 1..24: mol_type = other DNA
cagagtgtagcttaacacaaagca

SEQ ID NO: 46207 - DNA, 25 bp, synthetic construct
  misc_feature 1..25: note = Probe
  source 1..25: mol_type = other DNA
cagagtgtagcttaacacaaagcac

SEQ ID NO: 46208 - DNA, 26 bp, synthetic construct
  misc_feature 1..26: note = Probe
  source 1..26: mol_type = other DNA
cagagtgtagcttaacacaaagcacc

SEQ ID NO: 46209 - DNA, 27 bp, synthetic construct
  misc_feature 1..27: note = Probe
  source 1..27: mol_type = other DNA
cagagtgtagcttaacacaaagcaccc

SEQ ID NO: 46210 - DNA, 28 bp, synthetic construct
  misc_feature 1..28: note = Probe
  source 1..28: mol_type = other DNA
cagagtgtagcttaacacaaagcaccca

SEQ ID NO: 46211 - DNA, 29 bp, synthetic construct
  misc_feature 1..29: note = Probe
  source 1..29: mol_type = other DNA
cagagtgtagcttaacacaaagcacccaa

SEQ ID NO: 46212 - DNA, 30 bp, synthetic construct; identical to SEQ ID NO: 4262
  misc_feature 1..30: note = Probe
  source 1..30: mol_type = other DNA

SEQ ID NO: 46213 - DNA, 31 bp, synthetic construct; identical to SEQ ID NO: 4263
  misc_feature 1..31: note = Probe
  source 1..31: mol_type = other DNA

SEQ ID NO: 46214 - DNA, 32 bp, synthetic construct; identical to SEQ ID NO: 4264
  misc_feature 1..32: note = Probe
  source 1..32: mol_type = other DNA

SEQ ID NO: 46215 - DNA, 33 bp, synthetic construct; identical to SEQ ID NO: 4265
  misc_feature 1..33: note = Probe
  source 1..33: mol_type = other DNA

SEQ ID NO: 46216 - DNA, 34 bp, synthetic construct; identical to SEQ ID NO: 4266
  misc_feature 1..34: note = Probe
  source 1..34: mol_type = other DNA

SEQ ID NO: 46217 - DNA, 35 bp, synthetic construct; identical to SEQ ID NO: 4267
  misc_feature 1..35: note = Probe
  source 1..35: mol_type = other DNA

SEQ ID NO: 46218 - DNA, 36 bp, synthetic construct; identical to SEQ ID NO: 4268
  misc_feature 1..36: note = Probe
  source 1..36: mol_type = other DNA

SEQ ID NO: 46219 - DNA, 37 bp, synthetic construct; identical to SEQ ID NO: 4269
  misc_feature 1..37: note = Probe
  source 1..37: mol_type = other DNA

SEQ ID NO: 46220 - DNA, 38 bp, synthetic construct; identical to SEQ ID NO: 4270
  misc_feature 1..38: note = Probe
  source 1..38: mol_type = other DNA

SEQ ID NO: 46221 - DNA, 39 bp, synthetic construct; identical to SEQ ID NO: 4271
  misc_feature 1..39: note = Probe
  source 1..39: mol_type = other DNA

SEQ ID NO: 46222 - DNA, 40 bp, synthetic construct; identical to SEQ ID NO: 4272
  misc_feature 1..40: note = Probe
  source 1..40: mol_type = other DNA

SEQ ID NO: 46223 - DNA, 41 bp, synthetic construct; identical to SEQ ID NO: 4273
  misc_feature 1..41: note = Probe
  source 1..41: mol_type = other DNA

SEQ ID NO: 46224 - DNA, 42 bp, synthetic construct; identical to SEQ ID NO: 4274
  misc_feature 1..42: note = Probe
  source 1..42: mol_type = other DNA

SEQ ID NO: 46225 - DNA, 43 bp, synthetic construct; identical to SEQ ID NO: 4275
  misc_feature 1..43: note = Probe
  source 1..43: mol_type = other DNA

SEQ ID NO: 46226 - DNA, 44 bp, synthetic construct; identical to SEQ ID NO: 4276
  misc_feature 1..44: note = Probe
  source 1..44: mol_type = other DNA

SEQ ID NO: 46227 - DNA, 45 bp, synthetic construct; identical to SEQ ID NO: 4277
  misc_feature 1..45: note = Probe
  source 1..45: mol_type = other DNA

SEQ ID NO: 46228 - DNA, 46 bp, synthetic construct; identical to SEQ ID NO: 4278
  misc_feature 1..46: note = Probe
  source 1..46: mol_type = other DNA

SEQ ID NO: 46229 - DNA, 50 bp, synthetic construct; identical to SEQ ID NO: 4281
  misc_feature 1..50: note = Probe
  source 1..50: mol_type = other DNA

SEQ ID NO: 46230 - DNA, 49 bp, synthetic construct; identical to SEQ ID NO: 4283
  misc_feature 1..49: note = Probe
  source 1..49: mol_type = other DNA

SEQ ID NO: 46231 - DNA, 50 bp, synthetic construct; identical to SEQ ID NO: 4284
  misc_feature 1..50: note = Probe
  source 1..50: mol_type = other DNA

SEQ ID NO: 46232 - DNA, 29 bp, synthetic construct
  misc_feature 1..29: note = Probe
  source 1..29: mol_type = other DNA
cagcaacctcggttcgaatccgagtcacg

SEQ ID NO: 46233 - DNA, 30 bp, synthetic construct; identical to SEQ ID NO: 17915
  misc_feature 1..30: note = Probe
  source 1..30: mol_type = other DNA

SEQ ID NO: 46234 - DNA, 32 bp, synthetic construct; identical to SEQ ID NO: 4285
  misc_feature 1..32: note = Probe
  source 1..32: mol_type = other DNA

SEQ ID NO: 46235 - DNA, 34 bp, synthetic construct; identical to SEQ ID NO: 4286
  misc_feature 1..34: note = Probe
  source 1..34: mol_type = other DNA

SEQ ID NO: 46236 - DNA, 34 bp, synthetic construct; identical to SEQ ID NO: 4287
  misc_feature 1..34: note = Probe
  source 1..34: mol_type = other DNA

SEQ ID NO: 46237 - DNA, 35 bp, synthetic construct; identical to SEQ ID NO: 4288
  misc_feature 1..35: note = Probe
  source 1..35: mol_type = other DNA

SEQ ID NO: 46238 - DNA, 34 bp, synthetic construct; identical to SEQ ID NO: 4289
  misc_feature 1..34: note = Probe
  source 1..34: mol_type = other DNA

SEQ ID NO: 46239 - DNA, 35 bp, synthetic construct; identical to SEQ ID NO: 4290
  misc_feature 1..35: note = Probe
  source 1..35: mol_type = other DNA

SEQ ID NO: 46240 - DNA, 50 bp, synthetic construct
  misc_feature 1..50: note = Probe
  source 1..50: mol_type = other DNA
cagcactctggactctgaatccagcgatccgagttcaaatctcggtggga

SEQ ID NO: 46241 - DNA, 16 bp, synthetic construct
  misc_feature 1..16: note = Probe
  source 1..16: mol_type = other DNA
cagcagtacatgcaga

SEQ ID NO: 46242 - DNA, 19 bp, synthetic construct
  misc_feature 1..19: note = Probe
  source 1..19: mol_type = other DNA
cagcagtacatgcagagca

SEQ ID NO: 46243 - DNA, 20 bp, synthetic construct
  misc_feature 1..20: note = Probe
  source 1..20: mol_type = other DNA
cagcagtacatgcagagcaa

SEQ ID NO: 46244 - DNA, 31 bp, synthetic construct; identical to SEQ ID NO: 529
  misc_feature 1..31: note = Probe
  source 1..31: mol_type = other DNA

SEQ ID NO: 46245 - DNA, 33 bp, synthetic construct; identical to SEQ ID NO: 4291
  misc_feature 1..33: note = Probe
  source 1..33: mol_type = other DNA

SEQ ID NO: 46246 - DNA, 34 bp, synthetic construct; identical to SEQ ID NO: 4292
  misc_feature 1..34: note = Probe
  source 1..34: mol_type = other DNA

SEQ ID NO: 46247 - DNA, 35 bp, synthetic construct; identical to SEQ ID NO: 4293
  misc_feature 1..35: note = Probe
  source 1..35: mol_type = other DNA

SEQ ID NO: 46248 - DNA, 33 bp, synthetic construct; identical to SEQ ID NO: 4294
  misc_feature 1..33: note = Probe
  source 1..33: mol_type = other DNA

SEQ ID NO: 46249 - DNA, 29 bp, synthetic construct
  misc_feature 1..29: note = Probe
  source 1..29: mol_type = other DNA
cagcgatccgagttcaaatctcggtggga

SEQ ID NO: 46250 - DNA, 31 bp, synthetic construct; identical to SEQ ID NO: 4296
  misc_feature 1..31: note = Probe
  source 1..31: mol_type = other DNA

SEQ ID NO: 46251 - DNA, 33 bp, synthetic construct; identical to SEQ ID NO: 4297
  misc_feature 1..33: note = Probe
  source 1..33: mol_type = other DNA

SEQ ID NO: 46252 - DNA, 35 bp, synthetic construct; identical to SEQ ID NO: 4298
  misc_feature 1..35: note = Probe
  source 1..35: mol_type = other DNA

SEQ ID NO: 46253 - DNA, 26 bp, synthetic construct
  misc_feature 1..26: note = Probe
  source 1..26: mol_type = other DNA
cagctaaataagctatcgggcccata

SEQ ID NO: 46254 - DNA, 27 bp, synthetic construct
  misc_feature 1..27: note = Probe
  source 1..27: mol_type = other DNA
cagctaaataagctatcgggcccatac

SEQ ID NO: 46255 - DNA, 35 bp, synthetic construct; identical to SEQ ID NO: 4311
  misc_feature 1..35: note = Probe
  source 1..35: mol_type = other DNA

SEQ ID NO: 46256 - DNA, 36 bp, synthetic construct; identical to SEQ ID NO: 4312
  misc_feature 1..36: note = Probe
  source 1..36: mol_type = other DNA

SEQ ID NO: 46257 - DNA, 39 bp, synthetic construct; identical to SEQ ID NO: 4314
  misc_feature 1..39: note = Probe
  source 1..39: mol_type = other DNA

SEQ ID NO: 46258 - DNA, 50 bp, synthetic construct; identical to SEQ ID NO: 532
  misc_feature 1..50: note = Probe
  source 1..50: mol_type = other DNA

SEQ ID NO: 46259 - DNA, 24 bp, synthetic construct
  misc_feature 1..24: note = Probe
  source 1..24: mol_type = other DNA
cagcttcaaacctgccggggcttc

SEQ ID NO: 46260 - DNA, 25 bp, synthetic construct
  misc_feature 1..25: note = Probe
  source 1..25: mol_type = other DNA
cagcttcaaacctgccggggcttct

SEQ ID NO: 46261 - DNA, 26 bp, synthetic construct
  misc_feature 1..26: note = Probe
  source 1..26: mol_type = other DNA
cagcttcaaacctgccggggcttctc

SEQ ID NO: 46262 - DNA, 28 bp, synthetic construct
  misc_feature 1..28: note = Probe
  source 1..28: mol_type = other DNA
cagctttggggggttcgattccttcctt

SEQ ID NO: 46263 - DNA, 29 bp, synthetic construct
  misc_feature 1..29: note = Probe
  source 1..29: mol_type = other DNA
cagctttggggggttcgattccttccttt

SEQ ID NO: 46264 - DNA, 31 bp, synthetic construct; identical to SEQ ID NO: 17957
  misc_feature 1..31: note = Probe
  source 1..31: mol_type = other DNA

SEQ ID NO: 46265 - DNA, 32 bp, synthetic construct; identical to SEQ ID NO: 4333
  misc_feature 1..32: note = Probe
  source 1..32: mol_type = other DNA

SEQ ID NO: 46266 - DNA, 33 bp, synthetic construct; identical to SEQ ID NO: 4334
  misc_feature 1..33: note = Probe
  source 1..33: mol_type = other DNA

SEQ ID NO: 46267 - DNA, 34 bp, synthetic construct; identical to SEQ ID NO: 4335
  misc_feature 1..34: note = Probe
  source 1..34: mol_type = other DNA

SEQ ID NO: 46268 - DNA, 35 bp, synthetic construct; identical to SEQ ID NO: 4336
  misc_feature 1..35: note = Probe
  source 1..35: mol_type = other DNA

SEQ ID NO: 46269 - DNA, 36 bp, synthetic construct; identical to SEQ ID NO: 4337
  misc_feature 1..36: note = Probe
  source 1..36: mol_type = other DNA

SEQ ID NO: 46270 - DNA, 34 bp, synthetic construct; identical to SEQ ID NO: 17965
  misc_feature 1..34: note = Probe
  source 1..34: mol_type = other DNA

SEQ ID NO: 46271 - DNA, 34 bp, synthetic construct; identical to SEQ ID NO: 17968
  misc_feature 1..34: note = Probe
  source 1..34: mol_type = other DNA

SEQ ID NO: 46272 - DNA, 32 bp, synthetic construct; identical to SEQ ID NO: 17977
  misc_feature 1..32: note = Probe
  source 1..32: mol_type = other DNA

SEQ ID NO: 46273 - DNA, 33 bp, synthetic construct; identical to SEQ ID NO: 4339
  misc_feature 1..33: note = Probe
  source 1..33: mol_type = other DNA

SEQ ID NO: 46274 - DNA, 36 bp, synthetic construct; identical to SEQ ID NO: 4340
  misc_feature 1..36: note = Probe
  source 1..36: mol_type = other DNA

SEQ ID NO: 46275 - DNA, 21 bp, synthetic construct
  misc_feature 1..21: note = Probe
  source 1..21: mol_type = other DNA
cagggatgggttcgattctca

SEQ ID NO: 46276 - DNA, 29 bp, synthetic construct
  misc_feature 1..29: note = Probe
  source 1..29: mol_type = other DNA
cagggatgggttcgattctcatagtccta

SEQ ID NO: 46277 - DNA, 30 bp, synthetic construct; identical to SEQ ID NO: 17980
  misc_feature 1..30: note = Probe
  source 1..30: mol_type = other DNA

SEQ ID NO: 46278 - DNA, 31 bp, synthetic construct; identical to SEQ ID NO: 4343
  misc_feature 1..31: note = Probe
  source 1..31: mol_type = other DNA

SEQ ID NO: 46279 - DNA, 33 bp, synthetic construct; identical to SEQ ID NO: 4345
  misc_feature 1..33: note = Probe
  source 1..33: mol_type = other DNA

SEQ ID NO: 46280 - DNA, 36 bp, synthetic construct
  misc_feature 1..36: note = Probe
  source 1..36: mol_type = other DNA
cagggattgtgggttcgagtcccacctggggtgtcg

SEQ ID NO: 46281 - DNA, 29 bp, synthetic construct
  misc_feature 1..29: note = Probe
  source 1..29: mol_type = other DNA
cagggattgtgggttcgagtcccatctgg

SEQ ID NO: 46282 - DNA, 33 bp, synthetic construct; identical to SEQ ID NO: 17989
  misc_feature 1..33: note = Probe
  source 1..33: mol_type = other DNA

SEQ ID NO: 46283 - DNA, 33 bp, synthetic construct
  misc_feature 1..33: note = Probe
  source 1..33: mol_type = other DNA
caggggtcgcgagttcaaatctcgctggggcct

SEQ ID NO: 46284 - DNA, 27 bp, synthetic construct
  misc_feature 1..27: note = Probe
  source 1..27: mol_type = other DNA
caggggttaggcctctttttaccagct

SEQ ID NO: 46285 - DNA, 36 bp, synthetic construct; identical to SEQ ID NO: 4354
  misc_feature 1..36: note = Probe
  source 1..36: mol_type = other DNA

SEQ ID NO: 46286 - DNA, 26 bp, synthetic construct
  misc_feature 1..26: note = Probe
  source 1..26: mol_type = other DNA
caggttcgaatcctgccgactacggc

SEQ ID NO: 46287 - DNA, 27 bp, synthetic construct
  misc_feature 1..27: note = Probe
  source 1..27: mol_type = other DNA
caggttcgaatcctgccgactacggca

SEQ ID NO: 46288 - DNA, 26 bp, synthetic construct
  misc_feature 1..26: note = Probe
  source 1..26: mol_type = other DNA
caggttcgaatcctgccgactacgtc

SEQ ID NO: 46289 - DNA, 27 bp, synthetic construct
  misc_feature 1..27: note = Probe
  source 1..27: mol_type = other DNA
caggttcgaatcctgccgactacgtca

SEQ ID NO: 46290 - DNA, 16 bp, synthetic construct
  misc_feature 1..16: note = Probe
  source 1..16: mol_type = other DNA
cagtacatgcagagca

SEQ ID NO: 46291 - DNA, 23 bp, synthetic construct
  misc_feature 1..23: note = Probe
  source 1..23: mol_type = other DNA
cagtcagaggttcaattcctctt

SEQ ID NO: 46292 - DNA, 24 bp, synthetic construct
  misc_feature 1..24: note = Probe
  source 1..24: mol_type = other DNA
cagtcagaggttcaattcctcttc

SEQ ID NO: 46293 - DNA, 25 bp, synthetic construct
  misc_feature 1..25: note = Probe
  source 1..25: mol_type = other DNA
cagtcagaggttcaattcctcttct

SEQ ID NO: 46294 - DNA, 26 bp, synthetic construct
  misc_feature 1..26: note = Probe
  source 1..26: mol_type = other DNA
cagtcagaggttcaattcctcttctt

SEQ ID NO: 46295 - DNA, 27 bp, synthetic construct
  misc_feature 1..27: note = Probe
  source 1..27: mol_type = other DNA
cagtcagaggttcaattcctcttctta

SEQ ID NO: 46296 - DNA, 28 bp, synthetic construct
  misc_feature 1..28: note = Probe
  source 1..28: mol_type = other DNA
cagtcagaggttcaattcctcttcttaa

SEQ ID NO: 46297 - DNA, 29 bp, synthetic construct
  misc_feature 1..29: note = Probe
  source 1..29: mol_type = other DNA
cagtcagaggttcaattcctcttcttaac

SEQ ID NO: 46298 - DNA, 30 bp, synthetic construct; identical to SEQ ID NO: 4358
  misc_feature 1..30: note = Probe
  source 1..30: mol_type = other DNA

SEQ ID NO: 46299 - DNA, 33 bp, synthetic construct; identical to SEQ ID NO: 4360
  misc_feature 1..33: note = Probe
  source 1..33: mol_type = other DNA

SEQ ID NO: 46300 - DNA, 16 bp, synthetic construct
  misc_feature 1..16: note = Probe
  source 1..16: mol_type = other DNA
cagtcggtagagcatc

SEQ ID NO: 46301 - DNA, 19 bp, synthetic construct
  misc_feature 1..19: note = Probe
  source 1..19: mol_type = other DNA
cagtcggtagagcatcaga

SEQ ID NO: 46302 - DNA, 50 bp, synthetic construct
  misc_feature 1..50: note = Probe
  source 1..50: mol_type = other DNA
cagtctcataatctgaaggtcctgagttcgaacctcagagggggcagctg

SEQ ID NO: 46303 - DNA, 44 bp, synthetic construct; identical to SEQ ID NO: 4374
  misc_feature 1..44: note = Probe
  source 1..44: mol_type = other DNA

SEQ ID NO: 46304 - DNA, 18 bp, synthetic construct
  misc_feature 1..18: note = Probe
  source 1..18: mol_type = other DNA
cagtggtagaattctcgc

SEQ ID NO: 46305 - DNA, 19 bp, synthetic construct
  misc_feature 1..19: note = Probe
  source 1..19: mol_type = other DNA
cagtggtagaattctcgcc

SEQ ID NO: 46306 - DNA, 20 bp, synthetic construct
  misc_feature 1..20: note = Probe
  source 1..20: mol_type = other DNA
cagtggtagaattctcgcct

SEQ ID NO: 46307 - DNA, 21 bp, synthetic construct
  misc_feature 1..21: note = Probe
  source 1..21: mol_type = other DNA
cagtggtagaattctcgcctg

SEQ ID NO: 46308 - DNA, 17 bp, synthetic construct
  misc_feature 1..17: note = Probe
  source 1..17: mol_type = other DNA
cagttgacccgggttcg

SEQ ID NO: 46309 - DNA, 16 bp, synthetic construct
  misc_feature 1..16: note = Probe
  source 1..16: mol_type = other DNA
cagttgatgcagagtg

SEQ ID NO: 46310 - DNA, 21 bp, synthetic construct
  misc_feature 1..21: note = Probe
  source 1..21: mol_type = other DNA
cagttgatgcagagtggggtt

SEQ ID NO: 46311 - DNA, 25 bp, synthetic construct
  misc_feature 1..25: note = Probe
  source 1..25: mol_type = other DNA
cagttgatgcagagtggggttttgc

SEQ ID NO: 46312 - DNA, 26 bp, synthetic construct
  misc_feature 1..26: note = Probe
  source 1..26: mol_type = other DNA
cagttgatgcagagtggggttttgca

SEQ ID NO: 46313 - DNA, 30 bp, synthetic construct; identical to SEQ ID NO: 29638
  misc_feature 1..30: note = Probe
  source 1..30: mol_type = other DNA

SEQ ID NO: 46314 - DNA, 32 bp, synthetic construct; identical to SEQ ID NO: 18036
  misc_feature 1..32: note = Probe
  source 1..32: mol_type = other DNA

SEQ ID NO: 46315 - DNA, 35 bp, synthetic construct; identical to SEQ ID NO: 18039
  misc_feature 1..35: note = Probe
  source 1..35: mol_type = other DNA

SEQ ID NO: 46316 - DNA, 36 bp, synthetic construct; identical to SEQ ID NO: 4381
  misc_feature 1..36: note = Probe
  source 1..36: mol_type = other DNA

SEQ ID NO: 46317 - DNA, 24 bp, synthetic construct
  misc_feature 1..24: note = Probe
  source 1..24: mol_type = other DNA
cagttgattagggtgcttagctgt

SEQ ID NO: 46318 - DNA, 40 bp, synthetic construct
  misc_feature 1..40: note = Probe
  source 1..40: mol_type = other DNA
cagttgattagggtgcttagctgttaactaagtgtttgtg

SEQ ID NO: 46319 - DNA, 50 bp, synthetic construct; identical to SEQ ID NO: 538
  misc_feature 1..50: note = Probe
  source 1..50: mol_type = other DNA

SEQ ID NO: 46320 - DNA, 50 bp, synthetic construct; identical to SEQ ID NO: 4387
  misc_feature 1..50: note = Probe
  source 1..50: mol_type = other DNA

SEQ ID NO: 46321 - DNA, 43 bp, synthetic construct; identical to SEQ ID NO: 4391
  misc_feature 1..43: note = Probe
  source 1..43: mol_type = other DNA

SEQ ID NO: 46322 - DNA, 43 bp, synthetic construct; identical to SEQ ID NO: 29666
  misc_feature 1..43: note = Probe
  source 1..43: mol_type = other DNA

SEQ ID NO: 46323 - DNA, 50 bp, synthetic construct
  misc_feature 1..50: note = Probe
  source 1..50: mol_type = other DNA
cataatctgaaggtcctgagttcgaacctcagagggggcagctgccattt

SEQ ID NO: 46324 - DNA, 21 bp, synthetic construct
  misc_feature 1..21: note = Probe
  source 1..21: mol_type = other DNA
cataatctgaaggtcgtgagt

SEQ ID NO: 46325 - DNA, 40 bp, synthetic construct
  misc_feature 1..40: note = Probe
  source 1..40: mol_type = other DNA
cataatctgaaggtcgtgagttcgatcctcacacggggca

SEQ ID NO: 46326 - DNA, 35 bp, synthetic construct; identical to SEQ ID NO: 4395
  misc_feature 1..35: note = Probe
  source 1..35: mol_type = other DNA

SEQ ID NO: 46327 - DNA, 38 bp, synthetic construct
  misc_feature 1..38: note = Probe
  source 1..38: mol_type = other DNA
cataccccgaaaatgttggttatacccttcccgtacta

SEQ ID NO: 46328 - DNA, 40 bp, synthetic construct; identical to SEQ ID NO: 4396
  misc_feature 1..40: note = Probe
  source 1..40: mol_type = other DNA

SEQ ID NO: 46329 - DNA, 41 bp, synthetic construct; identical to SEQ ID NO: 4397
  misc_feature 1..41: note = Probe
  source 1..41: mol_type = other DNA

SEQ ID NO: 46330 - DNA, 50 bp, synthetic construct; identical to SEQ ID NO: 38909
  misc_feature 1..50: note = Probe
  source 1..50: mol_type = other DNA

SEQ ID NO: 46331 - DNA, 22 bp, synthetic construct
  misc_feature 1..22: note = Probe
  source 1..22: mol_type = other DNA
catatcattggtcgtggttgta

SEQ ID NO: 46332 - DNA, 24 bp, synthetic construct
  misc_feature 1..24: note = Probe
  source 1..24: mol_type = other DNA
catatcattggtcgtggttgtagt

SEQ ID NO: 46333 - DNA, 26 bp, synthetic construct
  misc_feature 1..26: note = Probe
  source 1..26: mol_type = other DNA
catatcattggtcgtggttgtagtcc

SEQ ID NO: 46334 - DNA, 28 bp, synthetic construct
  misc_feature 1..28: note = Probe
  source 1..28: mol_type = other DNA
catatcattggtcgtggttgtagtccgt

SEQ ID NO: 46335 - DNA, 34 bp, synthetic construct; identical to SEQ ID NO: 29681
  misc_feature 1..34: note = Probe
  source 1..34: mol_type = other DNA

SEQ ID NO: 46336 - DNA, 37 bp, synthetic construct
  misc_feature 1..37: note = Probe
  source 1..37: mol_type = other DNA
catatcattggtcgtggttgtagtccgtgcgagaata

SEQ ID NO: 46337 - DNA, 39 bp, synthetic construct; identical to SEQ ID NO: 4401
  misc_feature 1..39: note = Probe
  source 1..39: mol_type = other DNA

SEQ ID NO: 46338 - DNA, 40 bp, synthetic construct; identical to SEQ ID NO: 18062
  misc_feature 1..40: note = Probe
  source 1..40: mol_type = other DNA

SEQ ID NO: 46339 - DNA, 28 bp, synthetic construct
  misc_feature 1..28: note = Probe
  source 1..28: mol_type = other DNA
catattgaattgcaaattcgaagaagca

SEQ ID NO: 46340 - DNA, 46 bp, synthetic construct
  misc_feature 1..46: note = Probe
  source 1..46: mol_type = other DNA
catattgaattgcaaattcgaagaagcagcttcaaacctgccgggg

SEQ ID NO: 46341 - DNA, 50 bp, synthetic construct; identical to SEQ ID NO: 4406
  misc_feature 1..50: note = Probe
  source 1..50: mol_type = other DNA

SEQ ID NO: 46342 - DNA, 16 bp, synthetic construct
  misc_feature 1..16: note = Probe
  source 1..16: mol_type = other DNA
catcaccccataaaca

SEQ ID NO: 46343 - DNA, 17 bp, synthetic construct
  misc_feature 1..17: note = Probe
  source 1..17: mol_type = other DNA
catcaccccataaacaa

SEQ ID NO: 46344 - DNA, 18 bp, synthetic construct
  misc_feature 1..18: note = Probe
  source 1..18: mol_type = other DNA
catcaccccataaacaaa

SEQ ID NO: 46345 - DNA, 19 bp, synthetic construct
  misc_feature 1..19: note = Probe
  source 1..19: mol_type = other DNA
catcaccccataaacaaat

SEQ ID NO: 46346 - DNA, 50 bp, synthetic construct; identical to SEQ ID NO: 4419
  misc_feature 1..50: note = Probe
  source 1..50: mol_type = other DNA

SEQ ID NO: 46347 - DNA, 40 bp, synthetic construct; identical to SEQ ID NO: 4420
  misc_feature 1..40: note = Probe
  source 1..40: mol_type = other DNA

SEQ ID NO: 46348 - DNA, 37 bp, synthetic construct; identical to SEQ ID NO: 4421
  misc_feature 1..37: note = Probe
  source 1..37: mol_type = other DNA

SEQ ID NO: 46349 - DNA, 18 bp, synthetic construct
  misc_feature 1..18: note = Probe
  source 1..18: mol_type = other DNA
catgcccccatgtctaac

SEQ ID NO: 46350 - DNA, 19 bp, synthetic construct
  misc_feature 1..19: note = Probe
  source 1..19: mol_type = other DNA
catgcccccatgtctaaca

SEQ ID NO: 46351 - DNA, 22 bp, synthetic construct
  misc_feature 1..22: note = Probe
  source 1..22: mol_type = other DNA
catgcccccatgtctaacaaca

SEQ ID NO: 46352 - DNA, 23 bp, synthetic construct
  misc_feature 1..23: note = Probe
  source 1..23: mol_type = other DNA
catgcccccatgtctaacaacat

SEQ ID NO: 46353 - DNA, 27 bp, synthetic construct
  misc_feature 1..27: note = Probe
  source 1..27: mol_type = other DNA
catgcccccatgtctaacaacatggct

SEQ ID NO: 46354 - DNA, 28 bp, synthetic construct
  misc_feature 1..28: note = Probe
  source 1..28: mol_type = other DNA
catgcccccatgtctaacaacatggctt

SEQ ID NO: 46355 - DNA, 29 bp, synthetic construct
  misc_feature 1..29: note = Probe
  source 1..29: mol_type = other DNA
catgcccccatgtctaacaacatggcttt

SEQ ID NO: 46356 - DNA, 30 bp, synthetic construct; identical to SEQ ID NO: 4433
  misc_feature 1..30: note = Probe
  source 1..30: mol_type = other DNA

SEQ ID NO: 46357 - DNA, 31 bp, synthetic construct; identical to SEQ ID NO: 4434
  misc_feature 1..31: note = Probe
  source 1..31: mol_type = other DNA

SEQ ID NO: 46358 - DNA, 32 bp, synthetic construct; identical to SEQ ID NO: 4435
  misc_feature 1..32: note = Probe
  source 1..32: mol_type = other DNA

SEQ ID NO: 46359 - DNA, 33 bp, synthetic construct; identical to SEQ ID NO: 4436
  misc_feature 1..33: note = Probe
  source 1..33: mol_type = other DNA

SEQ ID NO: 46360 - DNA, 34 bp, synthetic construct; identical to SEQ ID NO: 4437
  misc_feature 1..34: note = Probe
  source 1..34: mol_type = other DNA

SEQ ID NO: 46361 - DNA, 35 bp, synthetic construct; identical to SEQ ID NO: 4438
  misc_feature 1..35: note = Probe
  source 1..35: mol_type = other DNA

SEQ ID NO: 46362 - DNA, 36 bp, synthetic construct; identical to SEQ ID NO: 4439
  misc_feature 1..36: note = Probe
  source 1..36: mol_type = other DNA

SEQ ID NO: 46363 - DNA, 23 bp, synthetic construct
  misc_feature 1..23: note = Probe
  source 1..23: mol_type = other DNA
catggccaacctcctactcctca

SEQ ID NO: 46364 - DNA, 33 bp, synthetic construct; identical to SEQ ID NO: 542
  misc_feature 1..33: note = Probe
  source 1..33: mol_type = other DNA

SEQ ID NO: 46365 - DNA, 28 bp, synthetic construct
  misc_feature 1..28: note = Probe
  source 1..28: mol_type = other DNA
catgtctaacaacatggctttctcaact

SEQ ID NO: 46366 - DNA, 26 bp, synthetic construct
  misc_feature 1..26: note = Probe
  source 1..26: mol_type = other DNA
catgttaacgttttcttccagctcca

SEQ ID NO: 46367 - DNA, 27 bp, synthetic construct
  misc_feature 1..27: note = Probe
  source 1..27: mol_type = other DNA
cattaaattatgataatcatatttacc

SEQ ID NO: 46368 - DNA, 32 bp, synthetic construct; identical to SEQ ID NO: 4447
  misc_feature 1..32: note = Probe
  source 1..32: mol_type = other DNA

SEQ ID NO: 46369 - DNA, 20 bp, synthetic construct
  misc_feature 1..20: note = Probe
  source 1..20: mol_type = other DNA
cattcttgcgacccgggttc

SEQ ID NO: 46370 - DNA, 37 bp, synthetic construct; identical to SEQ ID NO: 4449
  misc_feature 1..37: note = Probe
  source 1..37: mol_type = other DNA

SEQ ID NO: 46371 - DNA, 38 bp, synthetic construct; identical to SEQ ID NO: 18118
  misc_feature 1..38: note = Probe
  source 1..38: mol_type = other DNA

SEQ ID NO: 46372 - DNA, 39 bp, synthetic construct; identical to SEQ ID NO: 4450
  misc_feature 1..39: note = Probe
  source 1..39: mol_type = other DNA

SEQ ID NO: 46373 - DNA, 40 bp, synthetic construct; identical to SEQ ID NO: 4451
  misc_feature 1..40: note = Probe
  source 1..40: mol_type = other DNA

SEQ ID NO: 46374 - DNA, 41 bp, synthetic construct; identical to SEQ ID NO: 4452
  misc_feature 1..41: note = Probe
  source 1..41: mol_type = other DNA

SEQ ID NO: 46375 - DNA, 42 bp, synthetic construct
  misc_feature 1..42: note = Probe
  source 1..42: mol_type = other DNA
cattcttgcgacccgggttcgattcccgggcggcgcacttag

SEQ ID NO: 46376 - DNA, 38 bp, synthetic construct
  misc_feature 1..38: note = Probe
  source 1..38: mol_type = other DNA
cattcttgcgacccgggttcgattcccgggcggcgcat

SEQ ID NO: 46377 - DNA, 39 bp, synthetic construct; identical to SEQ ID NO: 4454
  misc_feature 1..39: note = Probe
  source 1..39: mol_type = other DNA

SEQ ID NO: 46378 - DNA, 40 bp, synthetic construct; identical to SEQ ID NO: 4455
  misc_feature 1..40: note = Probe
  source 1..40: mol_type = other DNA

SEQ ID NO: 46379 - DNA, 50 bp, synthetic construct; identical to SEQ ID NO: 4456
  misc_feature 1..50: note = Probe
  source 1..50: mol_type = other DNA

SEQ ID NO: 46380 - DNA, 20 bp, synthetic construct
  misc_feature 1..20: note = Probe
  source 1..20: mol_type = other DNA
cattggtcgtggttgtagtc

SEQ ID NO: 46381 - DNA, 21 bp, synthetic construct
  misc_feature 1..21: note = Probe
  source 1..21: mol_type = other DNA
cattggtcgtggttgtagtcc

SEQ ID NO: 46382 - DNA, 25 bp, synthetic construct
  misc_feature 1..25: note = Probe
  source 1..25: mol_type = other DNA
cattggtcgtggttgtagtccgtgc

SEQ ID NO: 46383 - DNA, 27 bp, synthetic construct
  misc_feature 1..27: note = Probe
  source 1..27: mol_type = other DNA
cattggtcgtggttgtagtccgtgcga

SEQ ID NO: 46384 - DNA, 31 bp, synthetic construct; identical to SEQ ID NO: 18131
  misc_feature 1..31: note = Probe
  source 1..31: mol_type = other DNA

SEQ ID NO: 46385 - DNA, 35 bp, synthetic construct; identical to SEQ ID NO: 4461
  misc_feature 1..35: note = Probe
  source 1..35: mol_type = other DNA

SEQ ID NO: 46386 - DNA, 50 bp, synthetic construct
  misc_feature 1..50: note = Probe
  source 1..50: mol_type = other DNA
cattggtcttaggccccaaaaattttggtgcaactccaaataaaagtaat

SEQ ID NO: 46387 - DNA, 26 bp, synthetic construct
  misc_feature 1..26: note = Probe
  source 1..26: mol_type = other DNA
cattggtggttcagtggtagaattct

SEQ ID NO: 46388 - DNA, 28 bp, synthetic construct
  misc_feature 1..28: note = Probe
  source 1..28: mol_type = other DNA
cattggtggttcagtggtagaattctcg

SEQ ID NO: 46389 - DNA, 30 bp, synthetic construct; identical to SEQ ID NO: 4462
  misc_feature 1..30: note = Probe
  source 1..30: mol_type = other DNA

SEQ ID NO: 46390 - DNA, 31 bp, synthetic construct; identical to SEQ ID NO: 4463
  misc_feature 1..31: note = Probe
  source 1..31: mol_type = other DNA

SEQ ID NO: 46391 - DNA, 32 bp, synthetic construct; identical to SEQ ID NO: 4464
  misc_feature 1..32: note = Probe
  source 1..32: mol_type = other DNA

SEQ ID NO: 46392 - DNA, 40 bp, synthetic construct; identical to SEQ ID NO: 18142
  misc_feature 1..40: note = Probe
  source 1..40: mol_type = other DNA

SEQ ID NO: 46393 - DNA, 27 bp, synthetic construct
  misc_feature 1..27: note = Probe
  source 1..27: mol_type = other DNA
ccaaaaattttggtgcaactccaaata

SEQ ID NO: 46394 - DNA, 36 bp, synthetic construct
  misc_feature 1..36: note = Probe
  source 1..36: mol_type = other DNA
ccaaaaattttggtgcaactccaaataaaagtaata

SEQ ID NO: 46395 - DNA, 27 bp, synthetic construct
  misc_feature 1..27: note = Probe
  source 1..27: mol_type = other DNA
ccaaaacatcagattgtgaatctgaca

SEQ ID NO: 46396 - DNA, 28 bp, synthetic construct
  misc_feature 1..28: note = Probe
  source 1..28: mol_type = other DNA
ccaaaacatcagattgtgaatctgacaa

SEQ ID NO: 46397 - DNA, 29 bp, synthetic construct
  misc_feature 1..29: note = Probe
  source 1..29: mol_type = other DNA
ccaaaacatcagattgtgaatctgacaac

SEQ ID NO: 46398 - DNA, 30 bp, synthetic construct; identical to SEQ ID NO: 4473
  misc_feature 1..30: note = Probe
  source 1..30: mol_type = other DNA

SEQ ID NO: 46399 - DNA, 31 bp, synthetic construct; identical to SEQ ID NO: 4474
  misc_feature 1..31: note = Probe
  source 1..31: mol_type = other DNA

SEQ ID NO: 46400 - DNA, 32 bp, synthetic construct; identical to SEQ ID NO: 4475
  misc_feature 1..32: note = Probe
  source 1..32: mol_type = other DNA

SEQ ID NO: 46401 - DNA, 33 bp, synthetic construct; identical to SEQ ID NO: 4476
  misc_feature 1..33: note = Probe
  source 1..33: mol_type = other DNA

SEQ ID NO: 46402 - DNA, 35 bp, synthetic construct; identical to SEQ ID NO: 4478
  misc_feature 1..35: note = Probe
  source 1..35: mol_type = other DNA

SEQ ID NO: 46403 - DNA, 36 bp, synthetic construct; identical to SEQ ID NO: 4479
  misc_feature 1..36: note = Probe
  source 1..36: mol_type = other DNA

SEQ ID NO: 46404 - DNA, 44 bp, synthetic construct; identical to SEQ ID NO: 556
  misc_feature 1..44: note = Probe
  source 1..44: mol_type = other DNA

SEQ ID NO: 46405 - DNA, 45 bp, synthetic construct; identical to SEQ ID NO: 557
  misc_feature 1..45: note = Probe
  source 1..45: mol_type = other DNA

SEQ ID NO: 46406 - DNA, 50 bp, synthetic construct; identical to SEQ ID NO: 4482
  misc_feature 1..50: note = Probe
  source 1..50: mol_type = other DNA

SEQ ID NO: 46407 - DNA, 17 bp, synthetic construct
  misc_feature 1..17: note = Probe
  source 1..17: mol_type = other DNA
ccaaacccactccacct

SEQ ID NO: 46408 - DNA, 29 bp, synthetic construct
  misc_feature 1..29: note = Probe
  source 1..29: mol_type = other DNA
ccaaagacaccccccacagtttatgtagc

SEQ ID NO: 46409 - DNA, 30 bp, synthetic construct; identical to SEQ ID NO: 18159
  misc_feature 1..30: note = Probe
  source 1..30: mol_type = other DNA

SEQ ID NO: 46410 - DNA, 35 bp, synthetic construct; identical to SEQ ID NO: 18164
  misc_feature 1..35: note = Probe
  source 1..35: mol_type = other DNA

SEQ ID NO: 46411 - DNA, 38 bp, synthetic construct; identical to SEQ ID NO: 18167
  misc_feature 1..38: note = Probe
  source 1..38: mol_type = other DNA

SEQ ID NO: 46412 - DNA, 50 bp, synthetic construct; identical to SEQ ID NO: 4485
  misc_feature 1..50: note = Probe
  source 1..50: mol_type = other DNA

SEQ ID NO: 46413 - DNA, 20 bp, synthetic construct
  misc_feature 1..20: note = Probe
  source 1..20: mol_type = other DNA
ccaacacctctttacagtga

SEQ ID NO: 46414 - DNA, 21 bp, synthetic construct
  misc_feature 1..21: note = Probe
  source 1..21: mol_type = other DNA
ccaacacctctttacagtgaa

SEQ ID NO: 46415 - DNA, 22 bp, synthetic construct
  misc_feature 1..22: note = Probe
  source 1..22: mol_type = other DNA
ccaacacctctttacagtgaaa

SEQ ID NO: 46416 - DNA, 23 bp, synthetic construct
  misc_feature 1..23: note = Probe
  source 1..23: mol_type = other DNA
ccaacacctctttacagtgaaat

SEQ ID NO: 46417 - DNA, 23 bp, synthetic construct
  misc_feature 1..23: note = Probe
  source 1..23: mol_type = other DNA
ccaactaaatactaccgtatggc

SEQ ID NO: 46418 - DNA, 17 bp, synthetic construct
  misc_feature 1..17: note = Probe
  source 1..17: mol_type = other DNA
ccaacttacacttagga

SEQ ID NO: 46419 - DNA, 18 bp, synthetic construct
  misc_feature 1..18: note = Probe
  source 1..18: mol_type = other DNA
ccaacttacacttaggag

SEQ ID NO: 46420 - DNA, 19 bp, synthetic construct
  misc_feature 1..19: note = Probe
  source 1..19: mol_type = other DNA
ccaacttacacttaggaga

SEQ ID NO: 46421 - DNA, 20 bp, synthetic construct
  misc_feature 1..20: note = Probe
  source 1..20: mol_type = other DNA
ccaacttacacttaggagat

SEQ ID NO: 46422 - DNA, 29 bp, synthetic construct
  misc_feature 1..29: note = Probe
  source 1..29: mol_type = other DNA
ccaacttacacttaggagatttcaactta

SEQ ID NO: 46423 - DNA, 32 bp, synthetic construct
  misc_feature 1..32: note = Probe
  source 1..32: mol_type = other DNA
ccaacttacacttaggagatttcaacttaact

SEQ ID NO: 46424 - DNA, 36 bp, synthetic construct; identical to SEQ ID NO: 4501
  misc_feature 1..36: note = Probe
  source 1..36: mol_type = other DNA

SEQ ID NO: 46425 - DNA, 38 bp, synthetic construct; identical to SEQ ID NO: 4502
  misc_feature 1..38: note = Probe
  source 1..38: mol_type = other DNA

SEQ ID NO: 46426 - DNA, 39 bp, synthetic construct; identical to SEQ ID NO: 4503
  misc_feature 1..39: note = Probe
  source 1..39: mol_type = other DNA

SEQ ID NO: 46427 - DNA, 40 bp, synthetic construct
  misc_feature 1..40: note = Probe
  source 1..40: mol_type = other DNA
ccaacttacacttaggagatttcaacttaacttgaccgct

SEQ ID NO: 46428 - DNA, 43 bp, synthetic construct; identical to SEQ ID NO: 4504
  misc_feature 1..43: note = Probe
  source 1..43: mol_type = other DNA

SEQ ID NO: 46429 - DNA, 44 bp, synthetic construct; identical to SEQ ID NO: 4505
  misc_feature 1..44: note = Probe
  source 1..44: mol_type = other DNA

SEQ ID NO: 46430 - DNA, 45 bp, synthetic construct; identical to SEQ ID NO: 4506
  misc_feature 1..45: note = Probe
  source 1..45: mol_type = other DNA

SEQ ID NO: 46431 - DNA, 46 bp, synthetic construct; identical to SEQ ID NO: 4507
  misc_feature 1..46: note = Probe
  source 1..46: mol_type = other DNA

SEQ ID NO: 46432 - DNA, 48 bp, synthetic construct; identical to SEQ ID NO: 4508
  misc_feature 1..48: note = Probe
  source 1..48: mol_type = other DNA

SEQ ID NO: 46433 - DNA, 49 bp, synthetic construct; identical to SEQ ID NO: 4509
  misc_feature 1..49: note = Probe
  source 1..49: mol_type = other DNA

SEQ ID NO: 46434 - DNA, 50 bp, synthetic construct; identical to SEQ ID NO: 4510
  misc_feature 1..50: note = Probe
  source 1..50: mol_type = other DNA

SEQ ID NO: 46435 - DNA, 16 bp, synthetic construct
  misc_feature 1..16: note = Probe
  source 1..16: mol_type = other DNA
ccaagcagttgacccg

SEQ ID NO: 46436 - DNA, 32 bp, synthetic construct
  misc_feature 1..32: note = Probe
  source 1..32: mol_type = other DNA
ccaagcagttgacccgggttcgattcccggcc

SEQ ID NO: 46437 - DNA, 33 bp, synthetic construct
  misc_feature 1..33: note = Probe
  source 1..33: mol_type = other DNA
ccaagcagttgacccgggttcgattcccggcca

SEQ ID NO: 46438 - DNA, 41 bp, synthetic construct; identical to SEQ ID NO: 18192
  misc_feature 1..41: note = Probe
  source 1..41: mol_type = other DNA

SEQ ID NO: 46439 - DNA, 41 bp, synthetic construct; identical to SEQ ID NO: 18195
  misc_feature 1..41: note = Probe
  source 1..41: mol_type = other DNA

SEQ ID NO: 46440 - DNA, 30 bp, synthetic construct; identical to SEQ ID NO: 18198
  misc_feature 1..30: note = Probe
  source 1..30: mol_type = other DNA

SEQ ID NO: 46441 - DNA, 31 bp, synthetic construct; identical to SEQ ID NO: 18199
  misc_feature 1..31: note = Probe
  source 1..31: mol_type = other DNA

SEQ ID NO: 46442 - DNA, 33 bp, synthetic construct; identical to SEQ ID NO: 18200
  misc_feature 1..33: note = Probe
  source 1..33: mol_type = other DNA

SEQ ID NO: 46443 - DNA, 36 bp, synthetic construct; identical to SEQ ID NO: 4515
  misc_feature 1..36: note = Probe
  source 1..36: mol_type = other DNA

SEQ ID NO: 46444 - DNA, 36 bp, synthetic construct; identical to SEQ ID NO: 4516
  misc_feature 1..36: note = Probe
  source 1..36: mol_type = other DNA

SEQ ID NO: 46445 - DNA, 38 bp, synthetic construct; identical to SEQ ID NO: 4520
  misc_feature 1..38: note = Probe
  source 1..38: mol_type = other DNA

SEQ ID NO: 46446 - DNA, 39 bp, synthetic construct; identical to SEQ ID NO: 4521
  misc_feature 1..39: note = Probe
  source 1..39: mol_type = other DNA

SEQ ID NO: 46447 - DNA, 40 bp, synthetic construct; identical to SEQ ID NO: 4522
  misc_feature 1..40: note = Probe
  source 1..40: mol_type = other DNA

SEQ ID NO: 46448 - DNA, 19 bp, synthetic construct
  misc_feature 1..19: note = Probe
  source 1..19: mol_type = other DNA
ccacacccacccaagaaca

SEQ ID NO: 46449 - DNA, 26 bp, synthetic construct
  misc_feature 1..26: note = Probe
  source 1..26: mol_type = other DNA
ccacacccacccaagaacagggtttg

SEQ ID NO: 46450 - DNA, 27 bp, synthetic construct
  misc_feature 1..27: note = Probe
  source 1..27: mol_type = other DNA
ccacacccacccaagaacagggtttgt

SEQ ID NO: 46451 - DNA, 28 bp, synthetic construct
  misc_feature 1..28: note = Probe
  source 1..28: mol_type = other DNA
ccacacccacccaagaacagggtttgtt

SEQ ID NO: 46452 - DNA, 29 bp, synthetic construct
  misc_feature 1..29: note = Probe
  source 1..29: mol_type = other DNA
ccacacccacccaagaacagggtttgtta

SEQ ID NO: 46453 - DNA, 25 bp, synthetic construct
  misc_feature 1..25: note = Probe
  source 1..25: mol_type = other DNA
ccacacctcagaaggtctcactttt

SEQ ID NO: 46454 - DNA, 32 bp, synthetic construct; identical to SEQ ID NO: 564
  misc_feature 1..32: note = Probe
  source 1..32: mol_type = other DNA

SEQ ID NO: 46455 - DNA, 16 bp, synthetic construct
  misc_feature 1..16: note = Probe
  source 1..16: mol_type = other DNA
ccacccaagaacaggg

SEQ ID NO: 46456 - DNA, 23 bp, synthetic construct
  misc_feature 1..23: note = Probe
  source 1..23: mol_type = other DNA
ccacccaagaacagggtttgtta

SEQ ID NO: 46457 - DNA, 20 bp, synthetic construct
  misc_feature 1..20: note = Probe
  source 1..20: mol_type = other DNA
ccacgcgggaggcccgggtt

SEQ ID NO: 46458 - DNA, 22 bp, synthetic construct
  misc_feature 1..22: note = Probe
  source 1..22: mol_type = other DNA
ccacgcgggaggcccgggttcg

SEQ ID NO: 46459 - DNA, 38 bp, synthetic construct; identical to SEQ ID NO: 18234
  misc_feature 1..38: note = Probe
  source 1..38: mol_type = other DNA

SEQ ID NO: 46460 - DNA, 41 bp, synthetic construct; identical to SEQ ID NO: 18235
  misc_feature 1..41: note = Probe
  source 1..41: mol_type = other DNA

SEQ ID NO: 46461 - DNA, 41 bp, synthetic construct; identical to SEQ ID NO: 4531
  misc_feature 1..41: note = Probe
  source 1..41: mol_type = other DNA

SEQ ID NO: 46462 - DNA, 41 bp, synthetic construct
  misc_feature 1..41: note = Probe
  source 1..41: mol_type = other DNA
ccacgcgggaggcccgggttcgattcccggccaatgcactt

SEQ ID NO: 46463 - DNA, 41 bp, synthetic construct; identical to SEQ ID NO: 4532
  misc_feature 1..41: note = Probe
  source 1..41: mol_type = other DNA

SEQ ID NO: 46464 - DNA, 48 bp, synthetic construct
  misc_feature 1..48: note = Probe
  source 1..48: mol_type = other DNA
ccacgcgggaggcccgggttcgattcccggccaatgcagcagcagacc

SEQ ID NO: 46465 - DNA, 50 bp, synthetic construct
  misc_feature 1..50: note = Probe
  source 1..50: mol_type = other DNA
ccacgcgggaggcccgggttcgattcccggccaatgcagcagcagacctt

SEQ ID NO: 46466 - DNA, 48 bp, synthetic construct
  misc_feature 1..48: note = Probe
  source 1..48: mol_type = other DNA
ccacgcgggaggcccgggttcgattcccggccaatgcagcagctgaaa

SEQ ID NO: 46467 - DNA, 50 bp, synthetic construct
  misc_feature 1..50: note = Probe
  source 1..50: mol_type = other DNA
ccacgcgggaggcccgggttcgattcccggccaatgcagcagctgaaagc

SEQ ID NO: 46468 - DNA, 38 bp, synthetic construct
  misc_feature 1..38: note = Probe
  source 1..38: mol_type = other DNA
ccacgcgggaggcccgggttcgattcccggcccatgca

SEQ ID NO: 46469 - DNA, 41 bp, synthetic construct; identical to SEQ ID NO: 4534
  misc_feature 1..41: note = Probe
  source 1..41: mol_type = other DNA

SEQ ID NO: 46470 - DNA, 20 bp, synthetic construct
  misc_feature 1..20: note = Probe
  source 1..20: mol_type = other DNA
ccacttctgacacatacttt

SEQ ID NO: 46471 - DNA, 27 bp, synthetic construct
  misc_feature 1..27: note = Probe
  source 1..27: mol_type = other DNA
ccacttctgacagagctcaattacttt

SEQ ID NO: 46472 - DNA, 23 bp, synthetic construct
  misc_feature 1..23: note = Probe
  source 1..23: mol_type = other DNA
ccagaggtcgatggatcgaaacc

SEQ ID NO: 46473 - DNA, 33 bp, synthetic construct
  misc_feature 1..33: note = Probe
  source 1..33: mol_type = other DNA
ccagaggtcgatggatcgaaaccatcctctgct

SEQ ID NO: 46474 - DNA, 32 bp, synthetic construct
  misc_feature 1..32: note = Probe
  source 1..32: mol_type = other DNA
ccagagtgtagcttaacacaaagcacccaact

SEQ ID NO: 46475 - DNA, 43 bp, synthetic construct
  misc_feature 1..43: note = Probe
  source 1..43: mol_type = other DNA
ccagagtgtagcttaacacaaagcacccaacttacacttagga

SEQ ID NO: 46476 - DNA, 44 bp, synthetic construct; identical to SEQ ID NO: 4546
  misc_feature 1..44: note = Probe
  source 1..44: mol_type = other DNA

SEQ ID NO: 46477 - DNA, 45 bp, synthetic construct; identical to SEQ ID NO: 4547
  misc_feature 1..45: note = Probe
  source 1..45: mol_type = other DNA

SEQ ID NO: 46478 - DNA, 46 bp, synthetic construct; identical to SEQ ID NO: 4548
  misc_feature 1..46: note = Probe
  source 1..46: mol_type = other DNA

SEQ ID NO: 46479 - DNA, 32 bp, synthetic construct; identical to SEQ ID NO: 4550
  misc_feature 1..32: note = Probe
  source 1..32: mol_type = other DNA

SEQ ID NO: 46480 - DNA, 34 bp, synthetic construct; identical to SEQ ID NO: 18248
  misc_feature 1..34: note = Probe
  source 1..34: mol_type = other DNA

SEQ ID NO: 46481 - DNA, 35 bp, synthetic construct; identical to SEQ ID NO: 18249
  misc_feature 1..35: note = Probe
  source 1..35: mol_type = other DNA

SEQ ID NO: 46482 - DNA, 36 bp, synthetic construct; identical to SEQ ID NO: 4552
  misc_feature 1..36: note = Probe
  source 1..36: mol_type = other DNA

SEQ ID NO: 46483 - DNA, 34 bp, synthetic construct; identical to SEQ ID NO: 18251
  misc_feature 1..34: note = Probe
  source 1..34: mol_type = other DNA

SEQ ID NO: 46484 - DNA, 30 bp, synthetic construct; identical to SEQ ID NO: 18252
  misc_feature 1..30: note = Probe
  source 1..30: mol_type = other DNA

SEQ ID NO: 46485 - DNA, 31 bp, synthetic construct; identical to SEQ ID NO: 18253
  misc_feature 1..31: note = Probe
  source 1..31: mol_type = other DNA

SEQ ID NO: 46486 - DNA, 32 bp, synthetic construct; identical to SEQ ID NO: 4553
  misc_feature 1..32: note = Probe
  source 1..32: mol_type = other DNA

SEQ ID NO: 46487 - DNA, 34 bp, synthetic construct; identical to SEQ ID NO: 18255
  misc_feature 1..34: note = Probe
  source 1..34: mol_type = other DNA

SEQ ID NO: 46488 - DNA, 36 bp, synthetic construct; identical to SEQ ID NO: 4554
  misc_feature 1..36: note = Probe
  source 1..36: mol_type = other DNA

SEQ ID NO: 46489 - DNA, 29 bp, synthetic construct
  misc_feature 1..29: note = Probe
  source 1..29: mol_type = other DNA
ccagcggtgcctcaaccgagcgtccaagc

SEQ ID NO: 46490 - DNA, 17 bp, synthetic construct
  misc_feature 1..17: note = Probe
  source 1..17: mol_type = other DNA
ccagctttggggggttc

SEQ ID NO: 46491 - DNA, 18 bp, synthetic construct
  misc_feature 1..18: note = Probe
  source 1..18: mol_type = other DNA
ccagctttggggggttcg

SEQ ID NO: 46492 - DNA, 29 bp, synthetic construct
  misc_feature 1..29: note = Probe
  source 1..29: mol_type = other DNA
ccagctttggggggttcgattccttcctt

SEQ ID NO: 46493 - DNA, 32 bp, synthetic construct; identical to SEQ ID NO: 4557
  misc_feature 1..32: note = Probe
  source 1..32: mol_type = other DNA

SEQ ID NO: 46494 - DNA, 33 bp, synthetic construct; identical to SEQ ID NO: 18265
  misc_feature 1..33: note = Probe
  source 1..33: mol_type = other DNA

SEQ ID NO: 46495 - DNA, 34 bp, synthetic construct; identical to SEQ ID NO: 18266
  misc_feature 1..34: note = Probe
  source 1..34: mol_type = other DNA

SEQ ID NO: 46496 - DNA, 35 bp, synthetic construct; identical to SEQ ID NO: 4558
  misc_feature 1..35: note = Probe
  source 1..35: mol_type = other DNA

SEQ ID NO: 46497 - DNA, 36 bp, synthetic construct; identical to SEQ ID NO: 4559
  misc_feature 1..36: note = Probe
  source 1..36: mol_type = other DNA

SEQ ID NO: 46498 - DNA, 37 bp, synthetic construct; identical to SEQ ID NO: 4560
  misc_feature 1..37: note = Probe
  source 1..37: mol_type = other DNA

SEQ ID NO: 46499 - DNA, 38 bp, synthetic construct; identical to SEQ ID NO: 18270
  misc_feature 1..38: note = Probe
  source 1..38: mol_type = other DNA

SEQ ID NO: 46500 - DNA, 31 bp, synthetic construct; identical to SEQ ID NO: 4561
  misc_feature 1..31: note = Probe
  source 1..31: mol_type = other DNA

SEQ ID NO: 46501 - DNA, 33 bp, synthetic construct; identical to SEQ ID NO: 18272
  misc_feature 1..33: note = Probe
  source 1..33: mol_type = other DNA

SEQ ID NO: 46502 - DNA, 34 bp, synthetic construct; identical to SEQ ID NO: 4562
  misc_feature 1..34: note = Probe
  source 1..34: mol_type = other DNA

SEQ ID NO: 46503 - DNA, 37 bp, synthetic construct; identical to SEQ ID NO: 4563
  misc_feature 1..37: note = Probe
  source 1..37: mol_type = other DNA

SEQ ID NO: 46504 - DNA, 27 bp, synthetic construct
  misc_feature 1..27: note = Probe
  source 1..27: mol_type = other DNA
ccagggattgtgggttcgagtcccatc

SEQ ID NO: 46505 - DNA, 32 bp, synthetic construct
  misc_feature 1..32: note = Probe
  source 1..32: mol_type = other DNA
ccagggattgtgggttcgagtcccatctgggg

SEQ ID NO: 46506 - DNA, 34 bp, synthetic construct; identical to SEQ ID NO: 18275
  misc_feature 1..34: note = Probe
  source 1..34: mol_type = other DNA

SEQ ID NO: 46507 - DNA, 31 bp, synthetic construct; identical to SEQ ID NO: 4569
  misc_feature 1..31: note = Probe
  source 1..31: mol_type = other DNA

SEQ ID NO: 46508 - DNA, 33 bp, synthetic construct; identical to SEQ ID NO: 4570
  misc_feature 1..33: note = Probe
  source 1..33: mol_type = other DNA

SEQ ID NO: 46509 - DNA, 27 bp, synthetic construct
  misc_feature 1..27: note = Probe
  source 1..27: mol_type = other DNA
ccagggttcaagtccctgttcgggcgg

SEQ ID NO: 46510 - DNA, 29 bp, synthetic construct
  misc_feature 1..29: note = Probe
  source 1..29: mol_type = other DNA
ccagggttcaagtccctgttcgggcggca

SEQ ID NO: 46511 - DNA, 27 bp, synthetic construct
  misc_feature 1..27: note = Probe
  source 1..27: mol_type = other DNA
ccagggttcaagtccctgttcgggcgt

SEQ ID NO: 46512 - DNA, 32 bp, synthetic construct; identical to SEQ ID NO: 38992
  misc_feature 1..32: note = Probe
  source 1..32: mol_type = other DNA

SEQ ID NO: 46513 - DNA, 33 bp, synthetic construct; identical to SEQ ID NO: 12926
  misc_feature 1..33: note = Probe
  source 1..33: mol_type = other DNA

SEQ ID NO: 46514 - DNA, 37 bp, synthetic construct; identical to SEQ ID NO: 4571
  misc_feature 1..37: note = Probe
  source 1..37: mol_type = other DNA

SEQ ID NO: 46515 - DNA, 45 bp, synthetic construct; identical to SEQ ID NO: 4572
  misc_feature 1..45: note = Probe
  source 1..45: mol_type = other DNA

SEQ ID NO: 46516 - DNA, 45 bp, synthetic construct; identical to SEQ ID NO: 4573
  misc_feature 1..45: note = Probe
  source 1..45: mol_type = other DNA

SEQ ID NO: 46517 - DNA, 41 bp, synthetic construct
  misc_feature 1..41: note = Probe
  source 1..41: mol_type = other DNA
ccagttgattagggtgcttagctgttaactaagtgtttgtg

SEQ ID NO: 46518 - DNA, 49 bp, synthetic construct
  misc_feature 1..49: note = Probe
  source 1..49: mol_type = other DNA
ccagttgattagggtgcttagctgttaactaagtgtttgtgggtttaag

SEQ ID NO: 46519 - DNA, 44 bp, synthetic construct; identical to SEQ ID NO: 4575
  misc_feature 1..44: note = Probe
  source 1..44: mol_type = other DNA

SEQ ID NO: 46520 - DNA, 34 bp, synthetic construct
  misc_feature 1..34: note = Probe
  source 1..34: mol_type = other DNA
ccataccccgaaaatgttggttatacccttcccg

SEQ ID NO: 46521 - DNA, 36 bp, synthetic construct; identical to SEQ ID NO: 18297
  misc_feature 1..36: note = Probe
  source 1..36: mol_type = other DNA

SEQ ID NO: 46522 - DNA, 37 bp, synthetic construct
  misc_feature 1..37: note = Probe
  source 1..37: mol_type = other DNA
ccataccccgaaaatgttggttatacccttcccgtac

SEQ ID NO: 46523 - DNA, 39 bp, synthetic construct; identical to SEQ ID NO: 18299
  misc_feature 1..39: note = Probe
  source 1..39: mol_type = other DNA

SEQ ID NO: 46524 - DNA, 41 bp, synthetic construct; identical to SEQ ID NO: 4577
  misc_feature 1..41: note = Probe
  source 1..41: mol_type = other DNA

SEQ ID NO: 46525 - DNA, 42 bp, synthetic construct; identical to SEQ ID NO: 4578
  misc_feature 1..42: note = Probe
  source 1..42: mol_type = other DNA

SEQ ID NO: 46526 - DNA, 27 bp, synthetic construct
  misc_feature 1..27: note = Probe
  source 1..27: mol_type = other DNA
ccatagtgtagtggttatcacgtctgc

SEQ ID NO: 46527 - DNA, 26 bp, synthetic construct
  misc_feature 1..26: note = Probe
  source 1..26: mol_type = other DNA
ccatgcacactactataaccacccta

SEQ ID NO: 46528 - DNA, 50 bp, synthetic construct; identical to SEQ ID NO: 4583
  misc_feature 1..50: note = Probe
  source 1..50: mol_type = other DNA

SEQ ID NO: 46529 - DNA, 40 bp, synthetic construct; identical to SEQ ID NO: 4586
  misc_feature 1..40: note = Probe
  source 1..40: mol_type = other DNA

SEQ ID NO: 46530 - DNA, 41 bp, synthetic construct; identical to SEQ ID NO: 4587
  misc_feature 1..41: note = Probe
  source 1..41: mol_type = other DNA

SEQ ID NO: 46531 - DNA, 19 bp, synthetic construct
  misc_feature 1..19: note = Probe
  source 1..19: mol_type = other DNA
ccattggtcttaggcccca

SEQ ID NO: 46532 - DNA, 50 bp, synthetic construct; identical to SEQ ID NO: 29872
  misc_feature 1..50: note = Probe
  source 1..50: mol_type = other DNA

SEQ ID NO: 46533 - DNA, 41 bp, synthetic construct; identical to SEQ ID NO: 18319
  misc_feature 1..41: note = Probe
  source 1..41: mol_type = other DNA

SEQ ID NO: 46534 - DNA, 28 bp, synthetic construct
  misc_feature 1..28: note = Probe
  source 1..28: mol_type = other DNA
cccaaaaattttggtgcaactccaaata

SEQ ID NO: 46535 - DNA, 37 bp, synthetic construct; identical to SEQ ID NO: 4594
  misc_feature 1..37: note = Probe
  source 1..37: mol_type = other DNA

SEQ ID NO: 46536 - DNA, 17 bp, synthetic construct
  misc_feature 1..17: note = Probe
  source 1..17: mol_type = other DNA
cccaaacccactccacc

SEQ ID NO: 46537 - DNA, 18 bp, synthetic construct
  misc_feature 1..18: note = Probe
  source 1..18: mol_type = other DNA
cccaaacccactccacct

SEQ ID NO: 46538 - DNA, 39 bp, synthetic construct; identical to SEQ ID NO: 18332
  misc_feature 1..39: note = Probe
  source 1..39: mol_type = other DNA

SEQ ID NO: 46539 - DNA, 24 bp, synthetic construct
  misc_feature 1..24: note = Probe
  source 1..24: mol_type = other DNA
cccaactaaatactaccgtatggc

SEQ ID NO: 46540 - DNA, 16 bp, synthetic construct
  misc_feature 1..16: note = Probe
  source 1..16: mol_type = other DNA
cccaacttacacttag

SEQ ID NO: 46541 - DNA, 17 bp, synthetic construct
  misc_feature 1..17: note = Probe
  source 1..17: mol_type = other DNA
cccaacttacacttagg

SEQ ID NO: 46542 - DNA, 18 bp, synthetic construct
  misc_feature 1..18: note = Probe
  source 1..18: mol_type = other DNA
cccaacttacacttagga

SEQ ID NO: 46543 - DNA, 19 bp, synthetic construct
  misc_feature 1..19: note = Probe
  source 1..19: mol_type = other DNA
cccaacttacacttaggag

SEQ ID NO: 46544 - DNA, 20 bp, synthetic construct
  misc_feature 1..20: note = Probe
  source 1..20: mol_type = other DNA
cccaacttacacttaggaga

SEQ ID NO: 46545 - DNA, 21 bp, synthetic construct
  misc_feature 1..21: note = Probe
  source 1..21: mol_type = other DNA
cccaacttacacttaggagat

SEQ ID NO: 46546 - DNA, 22 bp, synthetic construct
  misc_feature 1..22: note = Probe
  source 1..22: mol_type = other DNA
cccaacttacacttaggagatt

SEQ ID NO: 46547 - DNA, 25 bp, synthetic construct
  misc_feature 1..25: note = Probe
  source 1..25: mol_type = other DNA
cccaacttacacttaggagatttca

SEQ ID NO: 46548 - DNA, 27 bp, synthetic construct
  misc_feature 1..27: note = Probe
  source 1..27: mol_type = other DNA
cccaacttacacttaggagatttcaac

SEQ ID NO: 46549 - DNA, 30 bp, synthetic construct; identical to SEQ ID NO: 18345
  misc_feature 1..30: note = Probe
  source 1..30: mol_type = other DNA

SEQ ID NO: 46550 - DNA, 33 bp, synthetic construct
  misc_feature 1..33: note = Probe
  source 1..33: mol_type = other DNA
cccaacttacacttaggagatttcaacttaact

SEQ ID NO: 46551 - DNA, 35 bp, synthetic construct; identical to SEQ ID NO: 29879
  misc_feature 1..35: note = Probe
  source 1..35: mol_type = other DNA

SEQ ID NO: 46552 - DNA, 37 bp, synthetic construct
  misc_feature 1..37: note = Probe
  source 1..37: mol_type = other DNA
cccaacttacacttaggagatttcaacttaacttgac

SEQ ID NO: 46553 - DNA, 38 bp, synthetic construct
  misc_feature 1..38: note = Probe
  source 1..38: mol_type = other DNA
cccaacttacacttaggagatttcaacttaacttgacc

SEQ ID NO: 46554 - DNA, 39 bp, synthetic construct; identical to SEQ ID NO: 4606
  misc_feature 1..39: note = Probe
  source 1..39: mol_type = other DNA

SEQ ID NO: 46555 - DNA, 40 bp, synthetic construct; identical to SEQ ID NO: 4607
  misc_feature 1..40: note = Probe
  source 1..40: mol_type = other DNA

SEQ ID NO: 46556 - DNA, 41 bp, synthetic construct
  misc_feature 1..41: note = Probe
  source 1..41: mol_type = other DNA
cccaacttacacttaggagatttcaacttaacttgaccgct

SEQ ID NO: 46557 - DNA, 44 bp, synthetic construct; identical to SEQ ID NO: 4608
  misc_feature 1..44: note = Probe
  source 1..44: mol_type = other DNA

SEQ ID NO: 46558 - DNA, 45 bp, synthetic construct; identical to SEQ ID NO: 4609
  misc_feature 1..45: note = Probe
  source 1..45: mol_type = other DNA

SEQ ID NO: 46559 - DNA, 46 bp, synthetic construct; identical to SEQ ID NO: 4610
  misc_feature 1..46: note = Probe
  source 1..46: mol_type = other DNA

SEQ ID NO: 46560 - DNA, 48 bp, synthetic construct; identical to SEQ ID NO: 4611
  misc_feature 1..48: note = Probe
  source 1..48: mol_type = other DNA

SEQ ID NO: 46561 - DNA, 49 bp, synthetic construct; identical to SEQ ID NO: 4612
  misc_feature 1..49: note = Probe
  source 1..49: mol_type = other DNA

SEQ ID NO: 46562 - DNA, 50 bp, synthetic construct; identical to SEQ ID NO: 4613
  misc_feature 1..50: note = Probe
  source 1..50: mol_type = other DNA

SEQ ID NO: 46563 - DNA, 20 bp, synthetic construct
  misc_feature 1..20: note = Probe
  source 1..20: mol_type = other DNA
cccaagaacagggtttgtta

SEQ ID NO: 46564 - DNA, 20 bp, synthetic construct
  misc_feature 1..20: note = Probe
  source 1..20: mol_type = other DNA
cccacacccacccaagaaca

SEQ ID NO: 46565 - DNA, 26 bp, synthetic construct
  misc_feature 1..26: note = Probe
  source 1..26: mol_type = other DNA
cccacacccacccaagaacagggttt

SEQ ID NO: 46566 - DNA, 27 bp, synthetic construct
  misc_feature 1..27: note = Probe
  source 1..27: mol_type = other DNA
cccacacccacccaagaacagggtttg

SEQ ID NO: 46567 - DNA, 29 bp, synthetic construct
  misc_feature 1..29: note = Probe
  source 1..29: mol_type = other DNA
cccacacccacccaagaacagggtttgtt

SEQ ID NO: 46568 - DNA, 30 bp, synthetic construct; identical to SEQ ID NO: 4619
  misc_feature 1..30: note = Probe
  source 1..30: mol_type = other DNA

SEQ ID NO: 46569 - DNA, 33 bp, synthetic construct; identical to SEQ ID NO: 18359
  misc_feature 1..33: note = Probe
  source 1..33: mol_type = other DNA

SEQ ID NO: 46570 - DNA, 22 bp, synthetic construct
  misc_feature 1..22: note = Probe
  source 1..22: mol_type = other DNA
cccacatggtctagcggttagg

SEQ ID NO: 46571 - DNA, 28 bp, synthetic construct
  misc_feature 1..28: note = Probe
  source 1..28: mol_type = other DNA
cccacatggtctagcggttaggattcct

SEQ ID NO: 46572 - DNA, 31 bp, synthetic construct; identical to SEQ ID NO: 18367
  misc_feature 1..31: note = Probe
  source 1..31: mol_type = other DNA

SEQ ID NO: 46573 - DNA, 35 bp, synthetic construct; identical to SEQ ID NO: 583
  misc_feature 1..35: note = Probe
  source 1..35: mol_type = other DNA

SEQ ID NO: 46574 - DNA, 18 bp, synthetic construct
  misc_feature 1..18: note = Probe
  source 1..18: mol_type = other DNA
cccacccaagaacagggt

SEQ ID NO: 46575 - DNA, 20 bp, synthetic construct
  misc_feature 1..20: note = Probe
  source 1..20: mol_type = other DNA
cccacccaagaacagggttt

SEQ ID NO: 46576 - DNA, 23 bp, synthetic construct
  misc_feature 1..23: note = Probe
  source 1..23: mol_type = other DNA
cccacccaagaacagggtttgtt

SEQ ID NO: 46577 - DNA, 24 bp, synthetic construct
  misc_feature 1..24: note = Probe
  source 1..24: mol_type = other DNA
cccacccaagaacagggtttgtta

SEQ ID NO: 46578 - DNA, 16 bp, synthetic construct
  misc_feature 1..16: note = Probe
  source 1..16: mol_type = other DNA
cccacccagggacgcc

SEQ ID NO: 46579 - DNA, 26 bp, synthetic construct
  misc_feature 1..26: note = Probe
  source 1..26: mol_type = other DNA
cccacccagggacgcgtggtgacttt

SEQ ID NO: 46580 - DNA, 27 bp, synthetic construct
  misc_feature 1..27: note = Probe
  source 1..27: mol_type = other DNA
cccacccagggacgcgtggtgactttt

SEQ ID NO: 46581 - DNA, 26 bp, synthetic construct
  misc_feature 1..26: note = Probe
  source 1..26: mol_type = other DNA
cccacttctgacacaactatcttatt

SEQ ID NO: 46582 - DNA, 28 bp, synthetic construct
  misc_feature 1..28: note = Probe
  source 1..28: mol_type = other DNA
cccacttctgacagagctcaattacttt

SEQ ID NO: 46583 - DNA, 50 bp, synthetic construct
  misc_feature 1..50: note = Probe
  source 1..50: mol_type = other DNA
cccagaggtcgatggatcgaaaccatcctctgctatagactcccttttct

SEQ ID NO: 46584 - DNA, 33 bp, synthetic construct; identical to SEQ ID NO: 12940
  misc_feature 1..33: note = Probe
  source 1..33: mol_type = other DNA

SEQ ID NO: 46585 - DNA, 35 bp, synthetic construct; identical to SEQ ID NO: 18398
  misc_feature 1..35: note = Probe
  source 1..35: mol_type = other DNA

SEQ ID NO: 46586 - DNA, 34 bp, synthetic construct; identical to SEQ ID NO: 18404
  misc_feature 1..34: note = Probe
  source 1..34: mol_type = other DNA

SEQ ID NO: 46587 - DNA, 34 bp, synthetic construct; identical to SEQ ID NO: 36443
  misc_feature 1..34: note = Probe
  source 1..34: mol_type = other DNA

SEQ ID NO: 46588 - DNA, 35 bp, synthetic construct; identical to SEQ ID NO: 36444
  misc_feature 1..35: note = Probe
  source 1..35: mol_type = other DNA

SEQ ID NO: 46589 - DNA, 38 bp, synthetic construct; identical to SEQ ID NO: 18407
  misc_feature 1..38: note = Probe
  source 1..38: mol_type = other DNA

SEQ ID NO: 46590 - DNA, 19 bp, synthetic construct
  misc_feature 1..19: note = Probe
  source 1..19: mol_type = other DNA
cccataacccagaggtcga

SEQ ID NO: 46591 - DNA, 32 bp, synthetic construct
  misc_feature 1..32: note = Probe
  source 1..32: mol_type = other DNA
cccataacccagaggtcgatggatcgaaacca

SEQ ID NO: 46592 - DNA, 45 bp, synthetic construct; identical to SEQ ID NO: 18409
  misc_feature 1..45: note = Probe
  source 1..45: mol_type = other DNA

SEQ ID NO: 46593 - DNA, 44 bp, synthetic construct
  misc_feature 1..44: note = Probe
  source 1..44: mol_type = other DNA
cccataacccagaggtcgatggatcgaaaccatcctctgctatc

SEQ ID NO: 46594 - DNA, 20 bp, synthetic construct
  misc_feature 1..20: note = Probe
  source 1..20: mol_type = other DNA
cccataccccgaaaatgttg

SEQ ID NO: 46595 - DNA, 35 bp, synthetic construct
  misc_feature 1..35: note = Probe
  source 1..35: mol_type = other DNA
cccataccccgaaaatgttggttatacccttcccg

SEQ ID NO: 46596 - DNA, 36 bp, synthetic construct; identical to SEQ ID NO: 18411
  misc_feature 1..36: note = Probe
  source 1..36: mol_type = other DNA

SEQ ID NO: 46597 - DNA, 41 bp, synthetic construct; identical to SEQ ID NO: 4642
  misc_feature 1..41: note = Probe
  source 1..41: mol_type = other DNA

SEQ ID NO: 46598 - DNA, 42 bp, synthetic construct; identical to SEQ ID NO: 4643
  misc_feature 1..42: note = Probe
  source 1..42: mol_type = other DNA

SEQ ID NO: 46599 - DNA, 43 bp, synthetic construct; identical to SEQ ID NO: 4644
  misc_feature 1..43: note = Probe
  source 1..43: mol_type = other DNA

SEQ ID NO: 46600 - DNA, 50 bp, synthetic construct
  misc_feature 1..50: note = Probe
  source 1..50: mol_type = other DNA
cccataccccgaaaatgttggttatacccttcccgtactaattaatcccc

SEQ ID NO: 46601 - DNA, 30 bp, synthetic construct; identical to SEQ ID NO: 9682
  misc_feature 1..30: note = Probe
  source 1..30: mol_type = other DNA

SEQ ID NO: 46602 - DNA, 33 bp, synthetic construct; identical to SEQ ID NO: 4645
  misc_feature 1..33: note = Probe
  source 1..33: mol_type = other DNA

SEQ ID NO: 46603 - DNA, 34 bp, synthetic construct; identical to SEQ ID NO: 591
  misc_feature 1..34: note = Probe
  source 1..34: mol_type = other DNA

SEQ ID NO: 46604 - DNA, 35 bp, synthetic construct; identical to SEQ ID NO: 592
  misc_feature 1..35: note = Probe
  source 1..35: mol_type = other DNA

SEQ ID NO: 46605 - DNA, 25 bp, synthetic construct
  misc_feature 1..25: note = Probe
  source 1..25: mol_type = other DNA
cccatctggggtggcctgtgacttt

SEQ ID NO: 46606 - DNA, 16 bp, synthetic construct
  misc_feature 1..16: note = Probe
  source 1..16: mol_type = other DNA
cccatgtctaacaaca

SEQ ID NO: 46607 - DNA, 29 bp, synthetic construct
  misc_feature 1..29: note = Probe
  source 1..29: mol_type = other DNA
cccatgtctaacaacatggctttctcaac

SEQ ID NO: 46608 - DNA, 30 bp, synthetic construct; identical to SEQ ID NO: 4650
  misc_feature 1..30: note = Probe
  source 1..30: mol_type = other DNA

SEQ ID NO: 46609 - DNA, 21 bp, synthetic construct
  misc_feature 1..21: note = Probe
  source 1..21: mol_type = other DNA
cccattcttgcgacccgggtt

SEQ ID NO: 46610 - DNA, 22 bp, synthetic construct
  misc_feature 1..22: note = Probe
  source 1..22: mol_type = other DNA
cccattcttgcgacccgggttc

SEQ ID NO: 46611 - DNA, 24 bp, synthetic construct
  misc_feature 1..24: note = Probe
  source 1..24: mol_type = other DNA
cccattcttgcgacccgggttcga

SEQ ID NO: 46612 - DNA, 25 bp, synthetic construct
  misc_feature 1..25: note = Probe
  source 1..25: mol_type = other DNA
cccattcttgcgacccgggttcgat

SEQ ID NO: 46613 - DNA, 35 bp, synthetic construct; identical to SEQ ID NO: 598
  misc_feature 1..35: note = Probe
  source 1..35: mol_type = other DNA

SEQ ID NO: 46614 - DNA, 36 bp, synthetic construct; identical to SEQ ID NO: 4652
  misc_feature 1..36: note = Probe
  source 1..36: mol_type = other DNA

SEQ ID NO: 46615 - DNA, 38 bp, synthetic construct; identical to SEQ ID NO: 4653
  misc_feature 1..38: note = Probe
  source 1..38: mol_type = other DNA

SEQ ID NO: 46616 - DNA, 40 bp, synthetic construct; identical to SEQ ID NO: 4654
  misc_feature 1..40: note = Probe
  source 1..40: mol_type = other DNA

SEQ ID NO: 46617 - DNA, 41 bp, synthetic construct; identical to SEQ ID NO: 4655
  misc_feature 1..41: note = Probe
  source 1..41: mol_type = other DNA

SEQ ID NO: 46618 - DNA, 42 bp, synthetic construct; identical to SEQ ID NO: 4656
  misc_feature 1..42: note = Probe
  source 1..42: mol_type = other DNA

SEQ ID NO: 46619 - DNA, 43 bp, synthetic construct; identical to SEQ ID NO: 4657
  misc_feature 1..43: note = Probe
  source 1..43: mol_type = other DNA

SEQ ID NO: 46620 - DNA, 44 bp, synthetic construct; identical to SEQ ID NO: 4658
  misc_feature 1..44: note = Probe
  source 1..44: mol_type = other DNA

SEQ ID NO: 46621 - DNA, 45 bp, synthetic construct; identical to SEQ ID NO: 4659
  misc_feature 1..45: note = Probe
  source 1..45: mol_type = other DNA

SEQ ID NO: 46622 - DNA, 49 bp, synthetic construct; identical to SEQ ID NO: 4660
  misc_feature 1..49: note = Probe
  source 1..49: mol_type = other DNA

SEQ ID NO: 46623 - DNA, 50 bp, synthetic construct; identical to SEQ ID NO: 4661
  misc_feature 1..50: note = Probe
  source 1..50: mol_type = other DNA

SEQ ID NO: 46624 - DNA, 40 bp, synthetic construct; identical to SEQ ID NO: 4662
  misc_feature 1..40: note = Probe
  source 1..40: mol_type = other DNA

SEQ ID NO: 46625 - DNA, 41 bp, synthetic construct
  misc_feature 1..41: note = Probe
  source 1..41: mol_type = other DNA
cccattcttgcgacccgggttcgattcccgggcggcgcata

SEQ ID NO: 46626 - DNA, 42 bp, synthetic construct
  misc_feature 1..42: note = Probe
  source 1..42: mol_type = other DNA
cccattcttgcgacccgggttcgattcccgggcggcgcatag

SEQ ID NO: 46627 - DNA, 43 bp, synthetic construct; identical to SEQ ID NO: 4663
  misc_feature 1..43: note = Probe
  source 1..43: mol_type = other DNA

SEQ ID NO: 46628 - DNA, 44 bp, synthetic construct; identical to SEQ ID NO: 4664
  misc_feature 1..44: note = Probe
  source 1..44: mol_type = other DNA

SEQ ID NO: 46629 - DNA, 45 bp, synthetic construct; identical to SEQ ID NO: 4665
  misc_feature 1..45: note = Probe
  source 1..45: mol_type = other DNA

SEQ ID NO: 46630 - DNA, 50 bp, synthetic construct; identical to SEQ ID NO: 4666
  misc_feature 1..50: note = Probe
  source 1..50: mol_type = other DNA

SEQ ID NO: 46631 - DNA, 19 bp, synthetic construct
  misc_feature 1..19: note = Probe
  source 1..19: mol_type = other DNA
ccccaaaaattttggtgca

SEQ ID NO: 46632 - DNA, 24 bp, synthetic construct
  misc_feature 1..24: note = Probe
  source 1..24: mol_type = other DNA
ccccaaaaattttggtgcaactcc

SEQ ID NO: 46633 - DNA, 25 bp, synthetic construct
  misc_feature 1..25: note = Probe
  source 1..25: mol_type = other DNA
ccccaaaaattttggtgcaactcca

SEQ ID NO: 46634 - DNA, 26 bp, synthetic construct
  misc_feature 1..26: note = Probe
  source 1..26: mol_type = other DNA
ccccaaaaattttggtgcaactccaa

SEQ ID NO: 46635 - DNA, 27 bp, synthetic construct
  misc_feature 1..27: note = Probe
  source 1..27: mol_type = other DNA
ccccaaaaattttggtgcaactccaaa

SEQ ID NO: 46636 - DNA, 28 bp, synthetic construct
  misc_feature 1..28: note = Probe
  source 1..28: mol_type = other DNA
ccccaaaaattttggtgcaactccaaat

SEQ ID NO: 46637 - DNA, 29 bp, synthetic construct
  misc_feature 1..29: note = Probe
  source 1..29: mol_type = other DNA
ccccaaaaattttggtgcaactccaaata

SEQ ID NO: 46638 - DNA, 31 bp, synthetic construct; identical to SEQ ID NO: 18438
  misc_feature 1..31: note = Probe
  source 1..31: mol_type = other DNA

SEQ ID NO: 46639 - DNA, 33 bp, synthetic construct; identical to SEQ ID NO: 18439
  misc_feature 1..33: note = Probe
  source 1..33: mol_type = other DNA

SEQ ID NO: 46640 - DNA, 34 bp, synthetic construct; identical to SEQ ID NO: 18440
  misc_feature 1..34: note = Probe
  source 1..34: mol_type = other DNA

SEQ ID NO: 46641 - DNA, 35 bp, synthetic construct; identical to SEQ ID NO: 18441
  misc_feature 1..35: note = Probe
  source 1..35: mol_type = other DNA

SEQ ID NO: 46642 - DNA, 36 bp, synthetic construct; identical to SEQ ID NO: 18442
  misc_feature 1..36: note = Probe
  source 1..36: mol_type = other DNA

SEQ ID NO: 46643 - DNA, 37 bp, synthetic construct; identical to SEQ ID NO: 4672
  misc_feature 1..37: note = Probe
  source 1..37: mol_type = other DNA

SEQ ID NO: 46644 - DNA, 38 bp, synthetic construct; identical to SEQ ID NO: 4673
  misc_feature 1..38: note = Probe
  source 1..38: mol_type = other DNA

SEQ ID NO: 46645 - DNA, 40 bp, synthetic construct; identical to SEQ ID NO: 18445
  misc_feature 1..40: note = Probe
  source 1..40: mol_type = other DNA

SEQ ID NO: 46646 - DNA, 44 bp, synthetic construct
  misc_feature 1..44: note = Probe
  source 1..44: mol_type = other DNA
ccccaaaaattttggtgcaactccaaataaaagtaataaccatg

SEQ ID NO: 46647 - DNA, 19 bp, synthetic construct
  misc_feature 1..19: note = Probe
  source 1..19: mol_type = other DNA
ccccaaacccactccacct

SEQ ID NO: 46648 - DNA, 25 bp, synthetic construct
  misc_feature 1..25: note = Probe
  source 1..25: mol_type = other DNA
ccccaactaaatactaccgtatggc

SEQ ID NO: 46649 - DNA, 22 bp, synthetic construct
  misc_feature 1..22: note = Probe
  source 1..22: mol_type = other DNA
ccccatgtctaacaacatggct

SEQ ID NO: 46650 - DNA, 23 bp, synthetic construct
  misc_feature 1..23: note = Probe
  source 1..23: mol_type = other DNA
ccccatgtctaacaacatggctt

SEQ ID NO: 46651 - DNA, 24 bp, synthetic construct
  misc_feature 1..24: note = Probe
  source 1..24: mol_type = other DNA
ccccatgtctaacaacatggcttt

SEQ ID NO: 46652 - DNA, 25 bp, synthetic construct
  misc_feature 1..25: note = Probe
  source 1..25: mol_type = other DNA
ccccatgtctaacaacatggctttc

SEQ ID NO: 46653 - DNA, 28 bp, synthetic construct
  misc_feature 1..28: note = Probe
  source 1..28: mol_type = other DNA
ccccatgtctaacaacatggctttctca

SEQ ID NO: 46654 - DNA, 30 bp, synthetic construct; identical to SEQ ID NO: 4683
  misc_feature 1..30: note = Probe
  source 1..30: mol_type = other DNA

SEQ ID NO: 46655 - DNA, 31 bp, synthetic construct; identical to SEQ ID NO: 4684
  misc_feature 1..31: note = Probe
  source 1..31: mol_type = other DNA

SEQ ID NO: 46656 - DNA, 23 bp, synthetic construct
  misc_feature 1..23: note = Probe
  source 1..23: mol_type = other DNA
cccccatgtctaacaacatggct

SEQ ID NO: 46657 - DNA, 24 bp, synthetic construct
  misc_feature 1..24: note = Probe
  source 1..24: mol_type = other DNA
cccccatgtctaacaacatggctt

SEQ ID NO: 46658 - DNA, 25 bp, synthetic construct
  misc_feature 1..25: note = Probe
  source 1..25: mol_type = other DNA
cccccatgtctaacaacatggcttt

SEQ ID NO: 46659 - DNA, 26 bp, synthetic construct
  misc_feature 1..26: note = Probe
  source 1..26: mol_type = other DNA
cccccatgtctaacaacatggctttc

SEQ ID NO: 46660 - DNA, 27 bp, synthetic construct
  misc_feature 1..27: note = Probe
  source 1..27: mol_type = other DNA
cccccatgtctaacaacatggctttct

SEQ ID NO: 46661 - DNA, 29 bp, synthetic construct
  misc_feature 1..29: note = Probe
  source 1..29: mol_type = other DNA
cccccatgtctaacaacatggctttctca

SEQ ID NO: 46662 - DNA, 31 bp, synthetic construct; identical to SEQ ID NO: 4695
  misc_feature 1..31: note = Probe
  source 1..31: mol_type = other DNA

SEQ ID NO: 46663 - DNA, 32 bp, synthetic construct; identical to SEQ ID NO: 4696
  misc_feature 1..32: note = Probe
  source 1..32: mol_type = other DNA

SEQ ID NO: 46664 - DNA, 31 bp, synthetic construct
  misc_feature 1..31: note = Probe
  source 1..31: mol_type = other DNA
ccccctctgtgctccggagttacctcgtttt

SEQ ID NO: 46665 - DNA, 22 bp, synthetic construct
  misc_feature 1..22: note = Probe
  source 1..22: mol_type = other DNA
ccccgaaaatgttggttatacc

SEQ ID NO: 46666 - DNA, 23 bp, synthetic construct
  misc_feature 1..23: note = Probe
  source 1..23: mol_type = other DNA
ccccgaaaatgttggttataccc

SEQ ID NO: 46667 - DNA, 27 bp, synthetic construct
  misc_feature 1..27: note = Probe
  source 1..27: mol_type = other DNA
ccccgaaaatgttggttatacccttcc

SEQ ID NO: 46668 - DNA, 28 bp, synthetic construct
  misc_feature 1..28: note = Probe
  source 1..28: mol_type = other DNA
ccccgaaaatgttggttatacccttccc

SEQ ID NO: 46669 - DNA, 29 bp, synthetic construct
  misc_feature 1..29: note = Probe
  source 1..29: mol_type = other DNA
ccccgaaaatgttggttatacccttcccg

SEQ ID NO: 46670 - DNA, 30 bp, synthetic construct; identical to SEQ ID NO: 4700
  misc_feature 1..30: note = Probe
  source 1..30: mol_type = other DNA

SEQ ID NO: 46671 - DNA, 35 bp, synthetic construct; identical to SEQ ID NO: 4702
  misc_feature 1..35: note = Probe
  source 1..35: mol_type = other DNA

SEQ ID NO: 46672 - DNA, 36 bp, synthetic construct; identical to SEQ ID NO: 18491
  misc_feature 1..36: note = Probe
  source 1..36: mol_type = other DNA

SEQ ID NO: 46673 - DNA, 37 bp, synthetic construct; identical to SEQ ID NO: 4703
  misc_feature 1..37: note = Probe
  source 1..37: mol_type = other DNA

SEQ ID NO: 46674 - DNA, 29 bp, synthetic construct
  misc_feature 1..29: note = Probe
  source 1..29: mol_type = other DNA
ccccgcacaggttcgaatcctgttcgtga

SEQ ID NO: 46675 - DNA, 31 bp, synthetic construct
  misc_feature 1..31: note = Probe
  source 1..31: mol_type = other DNA
ccccgcacaggttcgaatcctgttcgtgacg

SEQ ID NO: 46676 - DNA, 50 bp, synthetic construct; identical to SEQ ID NO: 4704
  misc_feature 1..50: note = Probe
  source 1..50: mol_type = other DNA

SEQ ID NO: 46677 - DNA, 29 bp, synthetic construct
  misc_feature 1..29: note = Probe
  source 1..29: mol_type = other DNA
ccccgcgcaggttcgaatcctgccgacta

SEQ ID NO: 46678 - DNA, 29 bp, synthetic construct
  misc_feature 1..29: note = Probe
  source 1..29: mol_type = other DNA
ccccgcgcaggttcgaatcctgctcacag

SEQ ID NO: 46679 - DNA, 16 bp, synthetic construct
  misc_feature 1..16: note = Probe
  source 1..16: mol_type = other DNA
ccccggcacctccacc

SEQ ID NO: 46680 - DNA, 18 bp, synthetic construct
  misc_feature 1..18: note = Probe
  source 1..18: mol_type = other DNA
ccccggcacctccaccag

SEQ ID NO: 46681 - DNA, 19 bp, synthetic construct
  misc_feature 1..19: note = Probe
  source 1..19: mol_type = other DNA
ccccggcacctccaccagt

SEQ ID NO: 46682 - DNA, 20 bp, synthetic construct
  misc_feature 1..20: note = Probe
  source 1..20: mol_type = other DNA
ccccgggttcaatccccggc

SEQ ID NO: 46683 - DNA, 21 bp, synthetic construct
  misc_feature 1..21: note = Probe
  source 1..21: mol_type = other DNA
ccccgggttcaatccccggca

SEQ ID NO: 46684 - DNA, 23 bp, synthetic construct
  misc_feature 1..23: note = Probe
  source 1..23: mol_type = other DNA
ccccgggttcaatccccggcacc

SEQ ID NO: 46685 - DNA, 25 bp, synthetic construct
  misc_feature 1..25: note = Probe
  source 1..25: mol_type = other DNA
ccccgggttcaatccccggcacctc

SEQ ID NO: 46686 - DNA, 28 bp, synthetic construct
  misc_feature 1..28: note = Probe
  source 1..28: mol_type = other DNA
ccccgggttcaatccccggcacctccag

SEQ ID NO: 46687 - DNA, 29 bp, synthetic construct
  misc_feature 1..29: note = Probe
  source 1..29: mol_type = other DNA
ccccgggttcaatccccggcacctccagc

SEQ ID NO: 46688 - DNA, 28 bp, synthetic construct
  misc_feature 1..28: note = Probe
  source 1..28: mol_type = other DNA
ccccgggttcaatccccggcacctccat

SEQ ID NO: 46689 - DNA, 29 bp, synthetic construct
  misc_feature 1..29: note = Probe
  source 1..29: mol_type = other DNA
ccccgggttcaatccccggcacctccatt

SEQ ID NO: 46690 - DNA, 25 bp, synthetic construct
  misc_feature 1..25: note = Probe
  source 1..25: mol_type = other DNA
ccccgggttcaatccccggcatctc

SEQ ID NO: 46691 - DNA, 28 bp, synthetic construct
  misc_feature 1..28: note = Probe
  source 1..28: mol_type = other DNA
ccccgggttcaatccccggcatctccag

SEQ ID NO: 46692 - DNA, 29 bp, synthetic construct
  misc_feature 1..29: note = Probe
  source 1..29: mol_type = other DNA
ccccgggttcaatccccggcatctccaga

SEQ ID NO: 46693 - DNA, 30 bp, synthetic construct; identical to SEQ ID NO: 39077
  misc_feature 1..30: note = Probe
  source 1..30: mol_type = other DNA

SEQ ID NO: 46694 - DNA, 24 bp, synthetic construct
  misc_feature 1..24: note = Probe
  source 1..24: mol_type = other DNA
ccccgggttcgacccccggctcct

SEQ ID NO: 46695 - DNA, 25 bp, synthetic construct
  misc_feature 1..25: note = Probe
  source 1..25: mol_type = other DNA
ccccgggttcgacccccggctcctc

SEQ ID NO: 46696 - DNA, 28 bp, synthetic construct
  misc_feature 1..28: note = Probe
  source 1..28: mol_type = other DNA
ccccgggttcgacccccggctcctccag

SEQ ID NO: 46697 - DNA, 29 bp, synthetic construct
  misc_feature 1..29: note = Probe
  source 1..29: mol_type = other DNA
ccccgggttcgacccccggctcctccagt

SEQ ID NO: 46698 - DNA, 30 bp, synthetic construct
  misc_feature 1..30: note = Probe
  source 1..30: mol_type = other DNA
ccccgggttcgacccccggctcctccagtt

SEQ ID NO: 46699 - DNA, 20 bp, synthetic construct
  misc_feature 1..20: note = Probe
  source 1..20: mol_type = other DNA
ccccgggttcgatccccggc

SEQ ID NO: 46700 - DNA, 25 bp, synthetic construct
  misc_feature 1..25: note = Probe
  source 1..25: mol_type = other DNA
ccccgggttcgatccccggcatctc

SEQ ID NO: 46701 - DNA, 28 bp, synthetic construct
  misc_feature 1..28: note = Probe
  source 1..28: mol_type = other DNA
ccccgggttcgatccccggcatctccaa

SEQ ID NO: 46702 - DNA, 28 bp, synthetic construct
  misc_feature 1..28: note = Probe
  source 1..28: mol_type = other DNA
ccccgggttcgatccccggcatctccag

SEQ ID NO: 46703 - DNA, 28 bp, synthetic construct
  misc_feature 1..28: note = Probe
  source 1..28: mol_type = other DNA
ccccgggttcgatccccggcatctccat

SEQ ID NO: 46704 - DNA, 29 bp, synthetic construct
  misc_feature 1..29: note = Probe
  source 1..29: mol_type = other DNA
ccccgggttcgatccccggcatctccatt

SEQ ID NO: 46705 - DNA, 30 bp, synthetic construct; identical to SEQ ID NO: 4721
  misc_feature 1..30: note = Probe
  source 1..30: mol_type = other DNA

SEQ ID NO: 46706 - DNA, 26 bp, synthetic construct
  misc_feature 1..26: note = Probe
  source 1..26: mol_type = other DNA
ccccggttcaaatccgggtgccccct

SEQ ID NO: 46707 - DNA, 29 bp, synthetic construct
  misc_feature 1..29: note = Probe
  source 1..29: mol_type = other DNA
ccccggttcaaatccgggtgccccctcac

SEQ ID NO: 46708 - DNA, 29 bp, synthetic construct
  misc_feature 1..29: note = Probe
  source 1..29: mol_type = other DNA
ccccggttcaaatccgggtgccccctctg

SEQ ID NO: 46709 - DNA, 26 bp, synthetic construct
  misc_feature 1..26: note = Probe
  source 1..26: mol_type = other DNA
ccccggttcgaaaccgggcggaaaca

SEQ ID NO: 46710 - DNA, 29 bp, synthetic construct
  misc_feature 1..29: note = Probe
  source 1..29: mol_type = other DNA
ccccggttcgaaaccgggcggaaacacct

SEQ ID NO: 46711 - DNA, 26 bp, synthetic construct
  misc_feature 1..26: note = Probe
  source 1..26: mol_type = other DNA
ccccggttcgatcccgggcggaaaca

SEQ ID NO: 46712 - DNA, 29 bp, synthetic construct
  misc_feature 1..29: note = Probe
  source 1..29: mol_type = other DNA
ccccggttcgatcccgggcggaaacaggt

SEQ ID NO: 46713 - DNA, 27 bp, synthetic construct
  misc_feature 1..27: note = Probe
  source 1..27: mol_type = other DNA
cccctcatttacataaatattatacta

SEQ ID NO: 46714 - DNA, 28 bp, synthetic construct
  misc_feature 1..28: note = Probe
  source 1..28: mol_type = other DNA
cccctctgtgctccggagttacctcgtt

SEQ ID NO: 46715 - DNA, 29 bp, synthetic construct
  misc_feature 1..29: note = Probe
  source 1..29: mol_type = other DNA
cccctggcggtctagtggttaggattcgg

SEQ ID NO: 46716 - DNA, 31 bp, synthetic construct; identical to SEQ ID NO: 18512
  misc_feature 1..31: note = Probe
  source 1..31: mol_type = other DNA

SEQ ID NO: 46717 - DNA, 32 bp, synthetic construct; identical to SEQ ID NO: 4722
  misc_feature 1..32: note = Probe
  source 1..32: mol_type = other DNA

SEQ ID NO: 46718 - DNA, 33 bp, synthetic construct; identical to SEQ ID NO: 4723
  misc_feature 1..33: note = Probe
  source 1..33: mol_type = other DNA

SEQ ID NO: 46719 - DNA, 34 bp, synthetic construct; identical to SEQ ID NO: 4724
  misc_feature 1..34: note = Probe
  source 1..34: mol_type = other DNA

SEQ ID NO: 46720 - DNA, 35 bp, synthetic construct; identical to SEQ ID NO: 4725
  misc_feature 1..35: note = Probe
  source 1..35: mol_type = other DNA

SEQ ID NO: 46721 - DNA, 36 bp, synthetic construct; identical to SEQ ID NO: 4726
  misc_feature 1..36: note = Probe
  source 1..36: mol_type = other DNA

SEQ ID NO: 46722 - DNA, 27 bp, synthetic construct
  misc_feature 1..27: note = Probe
  source 1..27: mol_type = other DNA
cccgaaaatgttggttatacccttccc

SEQ ID NO: 46723 - DNA, 28 bp, synthetic construct
  misc_feature 1..28: note = Probe
  source 1..28: mol_type = other DNA
cccgaaaatgttggttatacccttcccg

SEQ ID NO: 46724 - DNA, 29 bp, synthetic construct
  misc_feature 1..29: note = Probe
  source 1..29: mol_type = other DNA
cccgaaaatgttggttatacccttcccgt

SEQ ID NO: 46725 - DNA, 33 bp, synthetic construct; identical to SEQ ID NO: 614
  misc_feature 1..33: note = Probe
  source 1..33: mol_type = other DNA

SEQ ID NO: 46726 - DNA, 34 bp, synthetic construct; identical to SEQ ID NO: 4734
  misc_feature 1..34: note = Probe
  source 1..34: mol_type = other DNA

SEQ ID NO: 46727 - DNA, 35 bp, synthetic construct; identical to SEQ ID NO: 4735
  misc_feature 1..35: note = Probe
  source 1..35: mol_type = other DNA

SEQ ID NO: 46728 - DNA, 36 bp, synthetic construct; identical to SEQ ID NO: 18528
  misc_feature 1..36: note = Probe
  source 1..36: mol_type = other DNA

SEQ ID NO: 46729 - DNA, 28 bp, synthetic construct
  misc_feature 1..28: note = Probe
  source 1..28: mol_type = other DNA
cccgcacaggttcgaatcctgttcgtga

SEQ ID NO: 46730 - DNA, 50 bp, synthetic construct; identical to SEQ ID NO: 4737
  misc_feature 1..50: note = Probe
  source 1..50: mol_type = other DNA

SEQ ID NO: 46731 - DNA, 50 bp, synthetic construct
  misc_feature 1..50: note = Probe
  source 1..50: mol_type = other DNA
cccgcctgtcacgcgggagaccggggttcgattccccgacggggaggccg

SEQ ID NO: 46732 - DNA, 16 bp, synthetic construct
  misc_feature 1..16: note = Probe
  source 1..16: mol_type = other DNA
cccgccttttttcccg

SEQ ID NO: 46733 - DNA, 27 bp, synthetic construct
  misc_feature 1..27: note = Probe
  source 1..27: mol_type = other DNA
cccgccttttttcccggcggcgggaga

SEQ ID NO: 46734 - DNA, 28 bp, synthetic construct
  misc_feature 1..28: note = Probe
  source 1..28: mol_type = other DNA
cccgccttttttcccggcggcgggagaa

SEQ ID NO: 46735 - DNA, 29 bp, synthetic construct
  misc_feature 1..29: note = Probe
  source 1..29: mol_type = other DNA
cccgccttttttcccggcggcgggagaag

SEQ ID NO: 46736 - DNA, 30 bp, synthetic construct; identical to SEQ ID NO: 4742
  misc_feature 1..30: note = Probe
  source 1..30: mol_type = other DNA

SEQ ID NO: 46737 - DNA, 28 bp, synthetic construct
  misc_feature 1..28: note = Probe
  source 1..28: mol_type = other DNA
cccgcgcaggttcgaatcctgccgacta

SEQ ID NO: 46738 - DNA, 28 bp, synthetic construct
  misc_feature 1..28: note = Probe
  source 1..28: mol_type = other DNA
cccgcgcaggttcgaatcctgctcacag

SEQ ID NO: 46739 - DNA, 33 bp, synthetic construct; identical to SEQ ID NO: 618
  misc_feature 1..33: note = Probe
  source 1..33: mol_type = other DNA

SEQ ID NO: 46740 - DNA, 34 bp, synthetic construct; identical to SEQ ID NO: 619
  misc_feature 1..34: note = Probe
  source 1..34: mol_type = other DNA

SEQ ID NO: 46741 - DNA, 16 bp, synthetic construct
  misc_feature 1..16: note = Probe
  source 1..16: mol_type = other DNA
cccggcacctccacca

SEQ ID NO: 46742 - DNA, 27 bp, synthetic construct
  misc_feature 1..27: note = Probe
  source 1..27: mol_type = other DNA
cccggccaacgcatgcggtaccacttt

SEQ ID NO: 46743 - DNA, 32 bp, synthetic construct; identical to SEQ ID NO: 12971
  misc_feature 1..32: note = Probe
  source 1..32: mol_type = other DNA

SEQ ID NO: 46744 - DNA, 35 bp, synthetic construct; identical to SEQ ID NO: 625
  misc_feature 1..35: note = Probe
  source 1..35: mol_type = other DNA

SEQ ID NO: 46745 - DNA, 33 bp, synthetic construct; identical to SEQ ID NO: 628
  misc_feature 1..33: note = Probe
  source 1..33: mol_type = other DNA

SEQ ID NO: 46746 - DNA, 35 bp, synthetic construct; identical to SEQ ID NO: 630
  misc_feature 1..35: note = Probe
  source 1..35: mol_type = other DNA

SEQ ID NO: 46747 - DNA, 28 bp, synthetic construct
  misc_feature 1..28: note = Probe
  source 1..28: mol_type = other DNA
cccgggttcaaatcccggacgagccccc

SEQ ID NO: 46748 - DNA, 29 bp, synthetic construct
  misc_feature 1..29: note = Probe
  source 1..29: mol_type = other DNA
cccgggttcaaatcccggacgagccccct

SEQ ID NO: 46749 - DNA, 26 bp, synthetic construct
  misc_feature 1..26: note = Probe
  source 1..26: mol_type = other DNA
cccgggttcaatccccggcacctcca

SEQ ID NO: 46750 - DNA, 28 bp, synthetic construct
  misc_feature 1..28: note = Probe
  source 1..28: mol_type = other DNA
cccgggttcaatccccggcacctccacc

SEQ ID NO: 46751 - DNA, 26 bp, synthetic construct
  misc_feature 1..26: note = Probe
  source 1..26: mol_type = other DNA
cccgggttcaatccccggcatctcca

SEQ ID NO: 46752 - DNA, 28 bp, synthetic construct
  misc_feature 1..28: note = Probe
  source 1..28: mol_type = other DNA
cccgggttcaattcccggtcagggaacc

SEQ ID NO: 46753 - DNA, 29 bp, synthetic construct
  misc_feature 1..29: note = Probe
  source 1..29: mol_type = other DNA
cccgggttcaattcccggtcagggaacca

SEQ ID NO: 46754 - DNA, 21 bp, synthetic construct
  misc_feature 1..21: note = Probe
  source 1..21: mol_type = other DNA
cccgggttcgatccccagcat

SEQ ID NO: 46755 - DNA, 27 bp, synthetic construct
  misc_feature 1..27: note = Probe
  source 1..27: mol_type = other DNA
cccgggttcgatccccagcatctccag

SEQ ID NO: 46756 - DNA, 28 bp, synthetic construct
  misc_feature 1..28: note = Probe
  source 1..28: mol_type = other DNA
cccgggttcgatccccagcatctccagt

SEQ ID NO: 46757 - DNA, 29 bp, synthetic construct
  misc_feature 1..29: note = Probe
  source 1..29: mol_type = other DNA
cccgggttcgatccccagcatctccagtg

SEQ ID NO: 46758 - DNA, 26 bp, synthetic construct
  misc_feature 1..26: note = Probe
  source 1..26: mol_type = other DNA
cccgggttcgatccccggcatctcca

SEQ ID NO: 46759 - DNA, 28 bp, synthetic construct
  misc_feature 1..28: note = Probe
  source 1..28: mol_type = other DNA
cccgggttcgatccccggcatctccatt

SEQ ID NO: 46760 - DNA, 29 bp, synthetic construct
  misc_feature 1..29: note = Probe
  source 1..29: mol_type = other DNA
cccgggttcgatccccggcatctccattg

SEQ ID NO: 46761 - DNA, 28 bp, synthetic construct
  misc_feature 1..28: note = Probe
  source 1..28: mol_type = other DNA
cccgggttcgattcccggtcagggaagc

SEQ ID NO: 46762 - DNA, 28 bp, synthetic construct
  misc_feature 1..28: note = Probe
  source 1..28: mol_type = other DNA
cccgggttcgattcccggtcatggaacc

SEQ ID NO: 46763 - DNA, 29 bp, synthetic construct
  misc_feature 1..29: note = Probe
  source 1..29: mol_type = other DNA
cccgggttcgattcccggtcatggaacca

SEQ ID NO: 46764 - DNA, 27 bp, synthetic construct
  misc_feature 1..27: note = Probe
  source 1..27: mol_type = other DNA
cccggtaatcgcataaaacttaaaact

SEQ ID NO: 46765 - DNA, 32 bp, synthetic construct; identical to SEQ ID NO: 18572
  misc_feature 1..32: note = Probe
  source 1..32: mol_type = other DNA

SEQ ID NO: 46766 - DNA, 35 bp, synthetic construct
  misc_feature 1..35: note = Probe
  source 1..35: mol_type = other DNA
cccggtaatcgcataaaacttaaaactttacagtc

SEQ ID NO: 46767 - DNA, 38 bp, synthetic construct
  misc_feature 1..38: note = Probe
  source 1..38: mol_type = other DNA
cccggtaatcgcataaaacttaaaactttacagtcaga

SEQ ID NO: 46768 - DNA, 40 bp, synthetic construct
  misc_feature 1..40: note = Probe
  source 1..40: mol_type = other DNA
cccggtaatcgcataaaacttaaaactttacagtcagagg

SEQ ID NO: 46769 - DNA, 43 bp, synthetic construct; identical to SEQ ID NO: 4759
  misc_feature 1..43: note = Probe
  source 1..43: mol_type = other DNA

SEQ ID NO: 46770 - DNA, 44 bp, synthetic construct
  misc_feature 1..44: note = Probe
  source 1..44: mol_type = other DNA
cccggtaatcgcataaaacttaaaactttacagtcagaggttca

SEQ ID NO: 46771 - DNA, 50 bp, synthetic construct; identical to SEQ ID NO: 632
  misc_feature 1..50: note = Probe
  source 1..50: mol_type = other DNA

SEQ ID NO: 46772 - DNA, 16 bp, synthetic construct
  misc_feature 1..16: note = Probe
  source 1..16: mol_type = other DNA
cccggtcagggaacca

SEQ ID NO: 46773 - DNA, 33 bp, synthetic construct; identical to SEQ ID NO: 4763
  misc_feature 1..33: note = Probe
  source 1..33: mol_type = other DNA

SEQ ID NO: 46774 - DNA, 26 bp, synthetic construct
  misc_feature 1..26: note = Probe
  source 1..26: mol_type = other DNA
ccctcatttacataaatattatacta

SEQ ID NO: 46775 - DNA, 32 bp, synthetic construct; identical to SEQ ID NO: 18577
  misc_feature 1..32: note = Probe
  source 1..32: mol_type = other DNA

SEQ ID NO: 46776 - DNA, 27 bp, synthetic construct
  misc_feature 1..27: note = Probe
  source 1..27: mol_type = other DNA
ccctgggttcaatccccagcacctcca

SEQ ID NO: 46777 - DNA, 31 bp, synthetic construct; identical to SEQ ID NO: 633
  misc_feature 1..31: note = Probe
  source 1..31: mol_type = other DNA

SEQ ID NO: 46778 - DNA, 32 bp, synthetic construct; identical to SEQ ID NO: 634
  misc_feature 1..32: note = Probe
  source 1..32: mol_type = other DNA

SEQ ID NO: 46779 - DNA, 34 bp, synthetic construct; identical to SEQ ID NO: 635
  misc_feature 1..34: note = Probe
  source 1..34: mol_type = other DNA

SEQ ID NO: 46780 - DNA, 18 bp, synthetic construct
  misc_feature 1..18: note = Probe
  source 1..18: mol_type = other DNA
ccctggtggtctagtggt

SEQ ID NO: 46781 - DNA, 19 bp, synthetic construct
  misc_feature 1..19: note = Probe
  source 1..19: mol_type = other DNA
ccctggtggtctagtggtt

SEQ ID NO: 46782 - DNA, 25 bp, synthetic construct
  misc_feature 1..25: note = Probe
  source 1..25: mol_type = other DNA
ccctggtggtctagtggttaggatt

SEQ ID NO: 46783 - DNA, 27 bp, synthetic construct
  misc_feature 1..27: note = Probe
  source 1..27: mol_type = other DNA
ccctggtggtctagtggttaggattcg

SEQ ID NO: 46784 - DNA, 28 bp, synthetic construct
  misc_feature 1..28: note = Probe
  source 1..28: mol_type = other DNA
ccctggtggtctagtggttaggattcgg

SEQ ID NO: 46785 - DNA, 29 bp, synthetic construct
  misc_feature 1..29: note = Probe
  source 1..29: mol_type = other DNA
ccctggtggtctagtggttaggattcggc

SEQ ID NO: 46786 - DNA, 36 bp, synthetic construct; identical to SEQ ID NO: 643
  misc_feature 1..36: note = Probe
  source 1..36: mol_type = other DNA

SEQ ID NO: 46787 - DNA, 28 bp, synthetic construct
  misc_feature 1..28: note = Probe
  source 1..28: mol_type = other DNA
ccctggttcaaatccgggtgccccctca

SEQ ID NO: 46788 - DNA, 29 bp, synthetic construct
  misc_feature 1..29: note = Probe
  source 1..29: mol_type = other DNA
ccctggttcaaatccgggtgccccctcaa

SEQ ID NO: 46789 - DNA, 26 bp, synthetic construct
  misc_feature 1..26: note = Probe
  source 1..26: mol_type = other DNA
ccctggttcaatcccgggtttcggca

SEQ ID NO: 46790 - DNA, 28 bp, synthetic construct
  misc_feature 1..28: note = Probe
  source 1..28: mol_type = other DNA
ccctggttcaatcccgggtttcggcagc

SEQ ID NO: 46791 - DNA, 16 bp, synthetic construct
  misc_feature 1..16: note = Probe
  source 1..16: mol_type = other DNA
ccctggttcgatcccg

SEQ ID NO: 46792 - DNA, 28 bp, synthetic construct
  misc_feature 1..28: note = Probe
  source 1..28: mol_type = other DNA
ccctggttcgatcccgggtttcggcact

SEQ ID NO: 46793 - DNA, 29 bp, synthetic construct
  misc_feature 1..29: note = Probe
  source 1..29: mol_type = other DNA
ccctggttcgatcccgggtttcggcactt

SEQ ID NO: 46794 - DNA, 20 bp, synthetic construct
  misc_feature 1..20: note = Probe
  source 1..20: mol_type = other DNA
ccgaaaatgttggttatacc

SEQ ID NO: 46795 - DNA, 21 bp, synthetic construct
  misc_feature 1..21: note = Probe
  source 1..21: mol_type = other DNA
ccgaaaatgttggttataccc

SEQ ID NO: 46796 - DNA, 25 bp, synthetic construct
  misc_feature 1..25: note = Probe
  source 1..25: mol_type = other DNA
ccgaaaatgttggttatacccttcc

SEQ ID NO: 46797 - DNA, 26 bp, synthetic construct
  misc_feature 1..26: note = Probe
  source 1..26: mol_type = other DNA
ccgaaaatgttggttatacccttccc

SEQ ID NO: 46798 - DNA, 27 bp, synthetic construct
  misc_feature 1..27: note = Probe
  source 1..27: mol_type = other DNA
ccgaaaatgttggttatacccttcccg

SEQ ID NO: 46799 - DNA, 28 bp, synthetic construct
  misc_feature 1..28: note = Probe
  source 1..28: mol_type = other DNA
ccgaaaatgttggttatacccttcccgt

SEQ ID NO: 46800 - DNA, 33 bp, synthetic construct; identical to SEQ ID NO: 4783
  misc_feature 1..33: note = Probe
  source 1..33: mol_type = other DNA

SEQ ID NO: 46801 - DNA, 34 bp, synthetic construct; identical to SEQ ID NO: 18602
  misc_feature 1..34: note = Probe
  source 1..34: mol_type = other DNA

SEQ ID NO: 46802 - DNA, 35 bp, synthetic construct; identical to SEQ ID NO: 18603
  misc_feature 1..35: note = Probe
  source 1..35: mol_type = other DNA

SEQ ID NO: 46803 - DNA, 37 bp, synthetic construct; identical to SEQ ID NO: 4785
  misc_feature 1..37: note = Probe
  source 1..37: mol_type = other DNA

SEQ ID NO: 46804 - DNA, 38 bp, synthetic construct; identical to SEQ ID NO: 18607
  misc_feature 1..38: note = Probe
  source 1..38: mol_type = other DNA

SEQ ID NO: 46805 - DNA, 36 bp, synthetic construct
  misc_feature 1..36: note = Probe
  source 1..36: mol_type = other DNA
ccgaaaggttggtggttcgatcccacccagggacgg

SEQ ID NO: 46806 - DNA, 29 bp, synthetic construct
  misc_feature 1..29: note = Probe
  source 1..29: mol_type = other DNA
ccgaggttgtgagttcgagcctcacctgg

SEQ ID NO: 46807 - DNA, 30 bp, synthetic construct
  misc_feature 1..30: note = Probe
  source 1..30: mol_type = other DNA
ccgaggttgtgagttcgagcctcacctgga

SEQ ID NO: 46808 - DNA, 32 bp, synthetic construct
  misc_feature 1..32: note = Probe
  source 1..32: mol_type = other DNA
ccgaggttgtgagttcgagcctcacctggagc

SEQ ID NO: 46809 - DNA, 36 bp, synthetic construct; identical to SEQ ID NO: 4787
  misc_feature 1..36: note = Probe
  source 1..36: mol_type = other DNA

SEQ ID NO: 46810 - DNA, 33 bp, synthetic construct
  misc_feature 1..33: note = Probe
  source 1..33: mol_type = other DNA
ccgaggttgtgagttcgatcctcacctggagca

SEQ ID NO: 46811 - DNA, 27 bp, synthetic construct
  misc_feature 1..27: note = Probe
  source 1..27: mol_type = other DNA
ccgcacaggttcgaatcctgttcgtga

SEQ ID NO: 46812 - DNA, 16 bp, synthetic construct
  misc_feature 1..16: note = Probe
  source 1..16: mol_type = other DNA
ccgcagcaacctcggt

SEQ ID NO: 46813 - DNA, 32 bp, synthetic construct; identical to SEQ ID NO: 4790
  misc_feature 1..32: note = Probe
  source 1..32: mol_type = other DNA

SEQ ID NO: 46814 - DNA, 33 bp, synthetic construct; identical to SEQ ID NO: 4791
  misc_feature 1..33: note = Probe
  source 1..33: mol_type = other DNA

SEQ ID NO: 46815 - DNA, 35 bp, synthetic construct; identical to SEQ ID NO: 18619
  misc_feature 1..35: note = Probe
  source 1..35: mol_type = other DNA

SEQ ID NO: 46816 - DNA, 36 bp, synthetic construct; identical to SEQ ID NO: 18620
  misc_feature 1..36: note = Probe
  source 1..36: mol_type = other DNA

SEQ ID NO: 46817 - DNA, 37 bp, synthetic construct; identical to SEQ ID NO: 4792
  misc_feature 1..37: note = Probe
  source 1..37: mol_type = other DNA

SEQ ID NO: 46818 - DNA, 36 bp, synthetic construct; identical to SEQ ID NO: 18622
  misc_feature 1..36: note = Probe
  source 1..36: mol_type = other DNA

SEQ ID NO: 46819 - DNA, 37 bp, synthetic construct; identical to SEQ ID NO: 4793
  misc_feature 1..37: note = Probe
  source 1..37: mol_type = other DNA

SEQ ID NO: 46820 - DNA, 38 bp, synthetic construct; identical to SEQ ID NO: 4794
  misc_feature 1..38: note = Probe
  source 1..38: mol_type = other DNA

SEQ ID NO: 46821 - DNA, 36 bp, synthetic construct; identical to SEQ ID NO: 18625
  misc_feature 1..36: note = Probe
  source 1..36: mol_type = other DNA

SEQ ID NO: 46822 - DNA, 37 bp, synthetic construct; identical to SEQ ID NO: 4795
  misc_feature 1..37: note = Probe
  source 1..37: mol_type = other DNA

SEQ ID NO: 46823 - DNA, 38 bp, synthetic construct; identical to SEQ ID NO: 4796
  misc_feature 1..38: note = Probe
  source 1..38: mol_type = other DNA

SEQ ID NO: 46824 - DNA, 35 bp, synthetic construct; identical to SEQ ID NO: 13008
  misc_feature 1..35: note = Probe
  source 1..35: mol_type = other DNA

SEQ ID NO: 46825 - DNA, 36 bp, synthetic construct; identical to SEQ ID NO: 4797
  misc_feature 1..36: note = Probe
  source 1..36: mol_type = other DNA

SEQ ID NO: 46826 - DNA, 36 bp, synthetic construct; identical to SEQ ID NO: 4798
  misc_feature 1..36: note = Probe
  source 1..36: mol_type = other DNA

SEQ ID NO: 46827 - DNA, 38 bp, synthetic construct; identical to SEQ ID NO: 18639
  misc_feature 1..38: note = Probe
  source 1..38: mol_type = other DNA

SEQ ID NO: 46828 - DNA, 36 bp, synthetic construct; identical to SEQ ID NO: 4800
  misc_feature 1..36: note = Probe
  source 1..36: mol_type = other DNA

SEQ ID NO: 46829 - DNA, 38 bp, synthetic construct; identical to SEQ ID NO: 4802
  misc_feature 1..38: note = Probe
  source 1..38: mol_type = other DNA

SEQ ID NO: 46830 - DNA, 17 bp, synthetic construct
  misc_feature 1..17: note = Probe
  source 1..17: mol_type = other DNA
ccgcctgtcacgcggga

SEQ ID NO: 46831 - DNA, 26 bp, synthetic construct
  misc_feature 1..26: note = Probe
  source 1..26: mol_type = other DNA
ccgcctgtcacgcgggagaccggggt

SEQ ID NO: 46832 - DNA, 50 bp, synthetic construct
  misc_feature 1..50: note = Probe
  source 1..50: mol_type = other DNA
ccgcctgtcacgcgggagaccggggttcaattccccgacggggaggtgtg

SEQ ID NO: 46833 - DNA, 42 bp, synthetic construct; identical to SEQ ID NO: 18656
  misc_feature 1..42: note = Probe
  source 1..42: mol_type = other DNA

SEQ ID NO: 46834 - DNA, 44 bp, synthetic construct
  misc_feature 1..44: note = Probe
  source 1..44: mol_type = other DNA
ccgcctgtcacgcgggagaccggggttcgattccccgacgggga

SEQ ID NO: 46835 - DNA, 49 bp, synthetic construct; identical to SEQ ID NO: 4803
  misc_feature 1..49: note = Probe
  source 1..49: mol_type = other DNA

SEQ ID NO: 46836 - DNA, 50 bp, synthetic construct; identical to SEQ ID NO: 4804
  misc_feature 1..50: note = Probe
  source 1..50: mol_type = other DNA

SEQ ID NO: 46837 - DNA, 50 bp, synthetic construct
  misc_feature 1..50: note = Probe
  source 1..50: mol_type = other DNA
ccgcctgtcacgcgggagaccggggttcgattccccgacggggaggcagc

SEQ ID NO: 46838 - DNA, 50 bp, synthetic construct
  misc_feature 1..50: note = Probe
  source 1..50: mol_type = other DNA
ccgcctgtcacgcgggagaccggggttcgattccccgacggggaggccgg

SEQ ID NO: 46839 - DNA, 27 bp, synthetic construct
  misc_feature 1..27: note = Probe
  source 1..27: mol_type = other DNA
ccgccttttttcccggcggcgggagaa

SEQ ID NO: 46840 - DNA, 27 bp, synthetic construct
  misc_feature 1..27: note = Probe
  source 1..27: mol_type = other DNA
ccgcgcaggttcgaatcctgccgacta

SEQ ID NO: 46841 - DNA, 27 bp, synthetic construct
  misc_feature 1..27: note = Probe
  source 1..27: mol_type = other DNA
ccgcgcaggttcgaatcctgctcacag

SEQ ID NO: 46842 - DNA, 31 bp, synthetic construct; identical to SEQ ID NO: 4807
  misc_feature 1..31: note = Probe
  source 1..31: mol_type = other DNA

SEQ ID NO: 46843 - DNA, 32 bp, synthetic construct; identical to SEQ ID NO: 4808
  misc_feature 1..32: note = Probe
  source 1..32: mol_type = other DNA

SEQ ID NO: 46844 - DNA, 33 bp, synthetic construct; identical to SEQ ID NO: 4809
  misc_feature 1..33: note = Probe
  source 1..33: mol_type = other DNA

SEQ ID NO: 46845 - DNA, 33 bp, synthetic construct; identical to SEQ ID NO: 4810
  misc_feature 1..33: note = Probe
  source 1..33: mol_type = other DNA

SEQ ID NO: 46846 - DNA, 33 bp, synthetic construct; identical to SEQ ID NO: 4811
  misc_feature 1..33: note = Probe
  source 1..33: mol_type = other DNA

SEQ ID NO: 46847 - DNA, 35 bp, synthetic construct; identical to SEQ ID NO: 4812
  misc_feature 1..35: note = Probe
  source 1..35: mol_type = other DNA

SEQ ID NO: 46848 - DNA, 26 bp, synthetic construct
  misc_feature 1..26: note = Probe
  source 1..26: mol_type = other DNA
ccgctggtgtagtggtatcatgcaag

SEQ ID NO: 46849 - DNA, 27 bp, synthetic construct
  misc_feature 1..27: note = Probe
  source 1..27: mol_type = other DNA
ccgctggtgtagtggtatcatgcaaga

SEQ ID NO: 46850 - DNA, 30 bp, synthetic construct; identical to SEQ ID NO: 657
  misc_feature 1..30: note = Probe
  source 1..30: mol_type = other DNA

SEQ ID NO: 46851 - DNA, 50 bp, synthetic construct; identical to SEQ ID NO: 18682
  misc_feature 1..50: note = Probe
  source 1..50: mol_type = other DNA

SEQ ID NO: 46852 - DNA, 16 bp, synthetic construct
  misc_feature 1..16: note = Probe
  source 1..16: mol_type = other DNA
ccggagatgaaaacct

SEQ ID NO: 46853 - DNA, 18 bp, synthetic construct
  misc_feature 1..18: note = Probe
  source 1..18: mol_type = other DNA
ccggagatgaaaaccttt

SEQ ID NO: 46854 - DNA, 19 bp, synthetic construct
  misc_feature 1..19: note = Probe
  source 1..19: mol_type = other DNA
ccggagatgaaaacctttt

SEQ ID NO: 46855 - DNA, 23 bp, synthetic construct
  misc_feature 1..23: note = Probe
  source 1..23: mol_type = other DNA
ccggagatgaaaacctttttcca

SEQ ID NO: 46856 - DNA, 28 bp, synthetic construct
  misc_feature 1..28: note = Probe
  source 1..28: mol_type = other DNA
ccggagatgaaaacctttttccaaggac

SEQ ID NO: 46857 - DNA, 30 bp, synthetic construct; identical to SEQ ID NO: 4816
  misc_feature 1..30: note = Probe
  source 1..30: mol_type = other DNA

SEQ ID NO: 46858 - DNA, 31 bp, synthetic construct; identical to SEQ ID NO: 4817
  misc_feature 1..31: note = Probe
  source 1..31: mol_type = other DNA

SEQ ID NO: 46859 - DNA, 32 bp, synthetic construct; identical to SEQ ID NO: 4818
  misc_feature 1..32: note = Probe
  source 1..32: mol_type = other DNA

SEQ ID NO: 46860 - DNA, 33 bp, synthetic construct; identical to SEQ ID NO: 4819
  misc_feature 1..33: note = Probe
  source 1..33: mol_type = other DNA

SEQ ID NO: 46861 - DNA, 30 bp, synthetic construct; identical to SEQ ID NO: 668
  misc_feature 1..30: note = Probe
  source 1..30: mol_type = other DNA

SEQ ID NO: 46862 - DNA, 31 bp, synthetic construct; identical to SEQ ID NO: 669
  misc_feature 1..31: note = Probe
  source 1..31: mol_type = other DNA

SEQ ID NO: 46863 - DNA, 33 bp, synthetic construct; identical to SEQ ID NO: 671
  misc_feature 1..33: note = Probe
  source 1..33: mol_type = other DNA

SEQ ID NO: 46864 - DNA, 34 bp, synthetic construct; identical to SEQ ID NO: 672
  misc_feature 1..34: note = Probe
  source 1..34: mol_type = other DNA

SEQ ID NO: 46865 - DNA, 28 bp, synthetic construct
  misc_feature 1..28: note = Probe
  source 1..28: mol_type = other DNA
ccggccaacgcagtgtcagtttttctct

SEQ ID NO: 46866 - DNA, 26 bp, synthetic construct
  misc_feature 1..26: note = Probe
  source 1..26: mol_type = other DNA
ccggccaacgcatgcggtaccacttt

SEQ ID NO: 46867 - DNA, 17 bp, synthetic construct
  misc_feature 1..17: note = Probe
  source 1..17: mol_type = other DNA
ccggcggcgggagaagt

SEQ ID NO: 46868 - DNA, 31 bp, synthetic construct; identical to SEQ ID NO: 676
  misc_feature 1..31: note = Probe
  source 1..31: mol_type = other DNA

SEQ ID NO: 46869 - DNA, 32 bp, synthetic construct; identical to SEQ ID NO: 677
  misc_feature 1..32: note = Probe
  source 1..32: mol_type = other DNA

SEQ ID NO: 46870 - DNA, 27 bp, synthetic construct
  misc_feature 1..27: note = Probe
  source 1..27: mol_type = other DNA
ccggctagctcagtcggtagagcatgg

SEQ ID NO: 46871 - DNA, 28 bp, synthetic construct
  misc_feature 1..28: note = Probe
  source 1..28: mol_type = other DNA
ccggctagctcagtcggtagagcatggg

SEQ ID NO: 46872 - DNA, 31 bp, synthetic construct; identical to SEQ ID NO: 681
  misc_feature 1..31: note = Probe
  source 1..31: mol_type = other DNA

SEQ ID NO: 46873 - DNA, 32 bp, synthetic construct; identical to SEQ ID NO: 682
  misc_feature 1..32: note = Probe
  source 1..32: mol_type = other DNA

SEQ ID NO: 46874 - DNA, 50 bp, synthetic construct; identical to SEQ ID NO: 4828
  misc_feature 1..50: note = Probe
  source 1..50: mol_type = other DNA

SEQ ID NO: 46875 - DNA, 25 bp, synthetic construct
  misc_feature 1..25: note = Probe
  source 1..25: mol_type = other DNA
ccggggttcgattccccgacgggga

SEQ ID NO: 46876 - DNA, 26 bp, synthetic construct
  misc_feature 1..26: note = Probe
  source 1..26: mol_type = other DNA
ccggggttcgattccccgacggggag

SEQ ID NO: 46877 - DNA, 29 bp, synthetic construct
  misc_feature 1..29: note = Probe
  source 1..29: mol_type = other DNA
ccggggttcgattccccgacggggaggca

SEQ ID NO: 46878 - DNA, 28 bp, synthetic construct
  misc_feature 1..28: note = Probe
  source 1..28: mol_type = other DNA
ccgggttcaatccccggcacctccacca

SEQ ID NO: 46879 - DNA, 25 bp, synthetic construct
  misc_feature 1..25: note = Probe
  source 1..25: mol_type = other DNA
ccgggttcgatccccagcatctcca

SEQ ID NO: 46880 - DNA, 28 bp, synthetic construct
  misc_feature 1..28: note = Probe
  source 1..28: mol_type = other DNA
ccgggttcgatccccagcatctccagtg

SEQ ID NO: 46881 - DNA, 26 bp, synthetic construct
  misc_feature 1..26: note = Probe
  source 1..26: mol_type = other DNA
ccggtaatcgcataaaacttaaaact

SEQ ID NO: 46882 - DNA, 31 bp, synthetic construct; identical to SEQ ID NO: 30140
  misc_feature 1..31: note = Probe
  source 1..31: mol_type = other DNA

SEQ ID NO: 46883 - DNA, 34 bp, synthetic construct
  misc_feature 1..34: note = Probe
  source 1..34: mol_type = other DNA
ccggtaatcgcataaaacttaaaactttacagtc

SEQ ID NO: 46884 - DNA, 37 bp, synthetic construct
  misc_feature 1..37: note = Probe
  source 1..37: mol_type = other DNA
ccggtaatcgcataaaacttaaaactttacagtcaga

SEQ ID NO: 46885 - DNA, 38 bp, synthetic construct
  misc_feature 1..38: note = Probe
  source 1..38: mol_type = other DNA
ccggtaatcgcataaaacttaaaactttacagtcagag

SEQ ID NO: 46886 - DNA, 39 bp, synthetic construct
  misc_feature 1..39: note = Probe
  source 1..39: mol_type = other DNA
ccggtaatcgcataaaacttaaaactttacagtcagagg

SEQ ID NO: 46887 - DNA, 42 bp, synthetic construct
  misc_feature 1..42: note = Probe
  source 1..42: mol_type = other DNA
ccggtaatcgcataaaacttaaaactttacagtcagaggttc

SEQ ID NO: 46888 - DNA, 50 bp, synthetic construct; identical to SEQ ID NO: 685
  misc_feature 1..50: note = Probe
  source 1..50: mol_type = other DNA

SEQ ID NO: 46889 - DNA, 27 bp, synthetic construct
  misc_feature 1..27: note = Probe
  source 1..27: mol_type = other DNA
ccggttcgaaaccgggcggaaacacct

SEQ ID NO: 46890 - DNA, 24 bp, synthetic construct
  misc_feature 1..24: note = Probe
  source 1..24: mol_type = other DNA
ccgtagtgtagtggtcatcacgtt

SEQ ID NO: 46891 - DNA, 27 bp, synthetic construct
  misc_feature 1..27: note = Probe
  source 1..27: mol_type = other DNA
ccgtagtgtagtggtcatcacgttcgc

SEQ ID NO: 46892 - DNA, 28 bp, synthetic construct
  misc_feature 1..28: note = Probe
  source 1..28: mol_type = other DNA
ccgtagtgtagtggtcatcacgttcgcc

SEQ ID NO: 46893 - DNA, 24 bp, synthetic construct
  misc_feature 1..24: note = Probe
  source 1..24: mol_type = other DNA
ccgtagtgtagtggttatcacgtt

SEQ ID NO: 46894 - DNA, 27 bp, synthetic construct
  misc_feature 1..27: note = Probe
  source 1..27: mol_type = other DNA
ccgtagtgtagtggttatcacgttcgc

SEQ ID NO: 46895 - DNA, 28 bp, synthetic construct
  misc_feature 1..28: note = Probe
  source 1..28: mol_type = other DNA
ccgtagtgtagtggttatcacgttcgcc

SEQ ID NO: 46896 - DNA, 29 bp, synthetic construct
  misc_feature 1..29: note = Probe
  source 1..29: mol_type = other DNA
ccgtagtgtagtggttatcacgttcgcct

SEQ ID NO: 46897 - DNA, 50 bp, synthetic construct; identical to SEQ ID NO: 4842
  misc_feature 1..50: note = Probe
  source 1..50: mol_type = other DNA

SEQ ID NO: 46898 - DNA, 49 bp, synthetic construct
  misc_feature 1..49: note = Probe
  source 1..49: mol_type = other DNA
ccgtagtgtagtggttatcacgttcgcctcacacgcgaaaggtccccgg

SEQ ID NO: 46899 - DNA, 50 bp, synthetic construct; identical to SEQ ID NO: 4847
  misc_feature 1..50: note = Probe
  source 1..50: mol_type = other DNA

SEQ ID NO: 46900 - DNA, 34 bp, synthetic construct; identical to SEQ ID NO: 689
  misc_feature 1..34: note = Probe
  source 1..34: mol_type = other DNA

SEQ ID NO: 46901 - DNA, 20 bp, synthetic construct
  misc_feature 1..20: note = Probe
  source 1..20: mol_type = other DNA
ccgtgtttcccccacgcttt

SEQ ID NO: 46902 - DNA, 21 bp, synthetic construct
  misc_feature 1..21: note = Probe
  source 1..21: mol_type = other DNA
ccgtgtttcccccacgctttt

SEQ ID NO: 46903 - DNA, 24 bp, synthetic construct
  misc_feature 1..24: note = Probe
  source 1..24: mol_type = other DNA
ccgttaacttccaattaactagtt

SEQ ID NO: 46904 - DNA, 28 bp, synthetic construct
  misc_feature 1..28: note = Probe
  source 1..28: mol_type = other DNA
ccgttaacttccaattaactagttttga

SEQ ID NO: 46905 - DNA, 49 bp, synthetic construct
  misc_feature 1..49: note = Probe
  source 1..49: mol_type = other DNA
ccgttaacttccaattaactagttttgacaacattcaaaaaagagtaat

SEQ ID NO: 46906 - DNA, 50 bp, synthetic construct; identical to SEQ ID NO: 4855
  misc_feature 1..50: note = Probe
  source 1..50: mol_type = other DNA

SEQ ID NO: 46907 - DNA, 43 bp, synthetic construct
  misc_feature 1..43: note = Probe
  source 1..43: mol_type = other DNA
cctaagccagggattgtgggttcgagtcccacccggggtaaag

SEQ ID NO: 46908 - DNA, 43 bp, synthetic construct
  misc_feature 1..43: note = Probe
  source 1..43: mol_type = other DNA
cctaagccagggattgtgggttcgagtcccacctggggtgtcg

SEQ ID NO: 46909 - DNA, 43 bp, synthetic construct; identical to SEQ ID NO: 4856
  misc_feature 1..43: note = Probe
  source 1..43: mol_type = other DNA

SEQ ID NO: 46910 - DNA, 24 bp, synthetic construct
  misc_feature 1..24: note = Probe
  source 1..24: mol_type = other DNA
cctagccccaaacccactccacct

SEQ ID NO: 46911 - DNA, 18 bp, synthetic construct
  misc_feature 1..18: note = Probe
  source 1..18: mol_type = other DNA
cctagcctttctattagc

SEQ ID NO: 46912 - DNA, 22 bp, synthetic construct
  misc_feature 1..22: note = Probe
  source 1..22: mol_type = other DNA
cctattctcaaactttaaatgg

SEQ ID NO: 46913 - DNA, 17 bp, synthetic construct
  misc_feature 1..17: note = Probe
  source 1..17: mol_type = other DNA
cctcaaagcaatacact

SEQ ID NO: 46914 - DNA, 19 bp, synthetic construct
  misc_feature 1..19: note = Probe
  source 1..19: mol_type = other DNA
cctcaaagcaatacactga

SEQ ID NO: 46915 - DNA, 32 bp, synthetic construct; identical to SEQ ID NO: 4861
  misc_feature 1..32: note = Probe
  source 1..32: mol_type = other DNA

SEQ ID NO: 46916 - DNA, 50 bp, synthetic construct; identical to SEQ ID NO: 691
  misc_feature 1..50: note = Probe
  source 1..50: mol_type = other DNA

SEQ ID NO: 46917 - DNA, 24 bp, synthetic construct
  misc_feature 1..24: note = Probe
  source 1..24: mol_type = other DNA
cctcacacgcgaaaggtccccggt

SEQ ID NO: 46918 - DNA, 45 bp, synthetic construct
  misc_feature 1..45: note = Probe
  source 1..45: mol_type = other DNA
cctcacacgcgaaaggtccccggttcgaaaccgggcggaaacacc

SEQ ID NO: 46919 - DNA, 23 bp, synthetic construct
  misc_feature 1..23: note = Probe
  source 1..23: mol_type = other DNA
cctcacacggggcacaataattt

SEQ ID NO: 46920 - DNA, 20 bp, synthetic construct
  misc_feature 1..20: note = Probe
  source 1..20: mol_type = other DNA
cctcagaaggtctcactttt

SEQ ID NO: 46921 - DNA, 25 bp, synthetic construct
  misc_feature 1..25: note = Probe
  source 1..25: mol_type = other DNA
cctcatttacataaatattatacta

SEQ ID NO: 46922 - DNA, 16 bp, synthetic construct
  misc_feature 1..16: note = Probe
  source 1..16: mol_type = other DNA
cctcctcaaagcaata

SEQ ID NO: 46923 - DNA, 18 bp, synthetic construct
  misc_feature 1..18: note = Probe
  source 1..18: mol_type = other DNA
cctcctcaaagcaataca

SEQ ID NO: 46924 - DNA, 20 bp, synthetic construct
  misc_feature 1..20: note = Probe
  source 1..20: mol_type = other DNA
cctcctcaaagcaatacact

SEQ ID NO: 46925 - DNA, 22 bp, synthetic construct
  misc_feature 1..22: note = Probe
  source 1..22: mol_type = other DNA
cctcgttagtatagtggtgagt

SEQ ID NO: 46926 - DNA, 31 bp, synthetic construct; identical to SEQ ID NO: 18793
  misc_feature 1..31: note = Probe
  source 1..31: mol_type = other DNA

SEQ ID NO: 46927 - DNA, 26 bp, synthetic construct
  misc_feature 1..26: note = Probe
  source 1..26: mol_type = other DNA
cctgagttcgaacctcagagggggca

SEQ ID NO: 46928 - DNA, 29 bp, synthetic construct
  misc_feature 1..29: note = Probe
  source 1..29: mol_type = other DNA
cctgagttcgaacctcagagggggcaagg

SEQ ID NO: 46929 - DNA, 28 bp, synthetic construct
  misc_feature 1..28: note = Probe
  source 1..28: mol_type = other DNA
cctgagttcgaacctcagagggggcagc

SEQ ID NO: 46930 - DNA, 29 bp, synthetic construct
  misc_feature 1..29: note = Probe
  source 1..29: mol_type = other DNA
cctgagttcgaacctcagagggggcagct

SEQ ID NO: 46931 - DNA, 28 bp, synthetic construct
  misc_feature 1..28: note = Probe
  source 1..28: mol_type = other DNA
cctgagttcgagcctcagagagggcagc

SEQ ID NO: 46932 - DNA, 29 bp, synthetic construct
  misc_feature 1..29: note = Probe
  source 1..29: mol_type = other DNA
cctgagttcgagcctcagagagggcagct

SEQ ID NO: 46933 - DNA, 23 bp, synthetic construct
  misc_feature 1..23: note = Probe
  source 1..23: mol_type = other DNA
cctgccacgcgggaggcccgggt

SEQ ID NO: 46934 - DNA, 50 bp, synthetic construct; identical to SEQ ID NO: 39222
  misc_feature 1..50: note = Probe
  source 1..50: mol_type = other DNA

SEQ ID NO: 46935 - DNA, 22 bp, synthetic construct
  misc_feature 1..22: note = Probe
  source 1..22: mol_type = other DNA
cctggcccaacccgtcatctac

SEQ ID NO: 46936 - DNA, 26 bp, synthetic construct
  misc_feature 1..26: note = Probe
  source 1..26: mol_type = other DNA
cctgggttcgaatcccagcggggcct

SEQ ID NO: 46937 - DNA, 27 bp, synthetic construct
  misc_feature 1..27: note = Probe
  source 1..27: mol_type = other DNA
cctgggttcgaatcccagcggggcctg

SEQ ID NO: 46938 - DNA, 27 bp, synthetic construct
  misc_feature 1..27: note = Probe
  source 1..27: mol_type = other DNA
cctgggttcgaatcccagcggggcctt

SEQ ID NO: 46939 - DNA, 26 bp, synthetic construct
  misc_feature 1..26: note = Probe
  source 1..26: mol_type = other DNA
cctgggttcgaatcccagcggtgcct

SEQ ID NO: 46940 - DNA, 29 bp, synthetic construct
  misc_feature 1..29: note = Probe
  source 1..29: mol_type = other DNA
cctgggttcgaatcccagcggtgcctccg

SEQ ID NO: 46941 - DNA, 27 bp, synthetic construct
  misc_feature 1..27: note = Probe
  source 1..27: mol_type = other DNA
cctgggttcgagccccagtggaaccac

SEQ ID NO: 46942 - DNA, 28 bp, synthetic construct
  misc_feature 1..28: note = Probe
  source 1..28: mol_type = other DNA
cctgggttcgagccccagtggaaccacg

SEQ ID NO: 46943 - DNA, 29 bp, synthetic construct
  misc_feature 1..29: note = Probe
  source 1..29: mol_type = other DNA
cctgggttcgagccccagtggaaccacgg

SEQ ID NO: 46944 - DNA, 27 bp, synthetic construct
  misc_feature 1..27: note = Probe
  source 1..27: mol_type = other DNA
cctggtggtctagtggttaggattcgg

SEQ ID NO: 46945 - DNA, 16 bp, synthetic construct
  misc_feature 1..16: note = Probe
  source 1..16: mol_type = other DNA
cctgtcacgcgggaga

SEQ ID NO: 46946 - DNA, 18 bp, synthetic construct
  misc_feature 1..18: note = Probe
  source 1..18: mol_type = other DNA
cctgtcacgcgggagacc

SEQ ID NO: 46947 - DNA, 22 bp, synthetic construct
  misc_feature 1..22: note = Probe
  source 1..22: mol_type = other DNA
cctgtcacgcgggagaccgggg

SEQ ID NO: 46948 - DNA, 25 bp, synthetic construct
  misc_feature 1..25: note = Probe
  source 1..25: mol_type = other DNA
cctgtcacgcgggagaccggggttc

SEQ ID NO: 46949 - DNA, 39 bp, synthetic construct; identical to SEQ ID NO: 13079
  misc_feature 1..39: note = Probe
  source 1..39: mol_type = other DNA

SEQ ID NO: 46950 - DNA, 41 bp, synthetic construct; identical to SEQ ID NO: 36523
  misc_feature 1..41: note = Probe
  source 1..41: mol_type = other DNA

SEQ ID NO: 46951 - DNA, 42 bp, synthetic construct; identical to SEQ ID NO: 36524
  misc_feature 1..42: note = Probe
  source 1..42: mol_type = other DNA

SEQ ID NO: 46952 - DNA, 43 bp, synthetic construct; identical to SEQ ID NO: 39243
  misc_feature 1..43: note = Probe
  source 1..43: mol_type = other DNA

SEQ ID NO: 46953 - DNA, 45 bp, synthetic construct; identical to SEQ ID NO: 4880
  misc_feature 1..45: note = Probe
  source 1..45: mol_type = other DNA

SEQ ID NO: 46954 - DNA, 48 bp, synthetic construct
  misc_feature 1..48: note = Probe
  source 1..48: mol_type = other DNA
cctgtcacgcgggagaccggggttcaattccccgacggggaggtgtgt

SEQ ID NO: 46955 - DNA, 50 bp, synthetic construct; identical to SEQ ID NO: 4881
  misc_feature 1..50: note = Probe
  source 1..50: mol_type = other DNA

SEQ ID NO: 46956 - DNA, 38 bp, synthetic construct; identical to SEQ ID NO: 13081
  misc_feature 1..38: note = Probe
  source 1..38: mol_type = other DNA

SEQ ID NO: 46957 - DNA, 40 bp, synthetic construct; identical to SEQ ID NO: 13083
  misc_feature 1..40: note = Probe
  source 1..40: mol_type = other DNA

SEQ ID NO: 46958 - DNA, 43 bp, synthetic construct; identical to SEQ ID NO: 18830
  misc_feature 1..43: note = Probe
  source 1..43: mol_type = other DNA

SEQ ID NO: 46959 - DNA, 45 bp, synthetic construct; identical to SEQ ID NO: 4883
  misc_feature 1..45: note = Probe
  source 1..45: mol_type = other DNA

SEQ ID NO: 46960 - DNA, 50 bp, synthetic construct; identical to SEQ ID NO: 18832
  misc_feature 1..50: note = Probe
  source 1..50: mol_type = other DNA

SEQ ID NO: 46961 - DNA, 45 bp, synthetic construct; identical to SEQ ID NO: 4885
  misc_feature 1..45: note = Probe
  source 1..45: mol_type = other DNA

SEQ ID NO: 46962 - DNA, 50 bp, synthetic construct; identical to SEQ ID NO: 39263
  misc_feature 1..50: note = Probe
  source 1..50: mol_type = other DNA

SEQ ID NO: 46963 - DNA, 43 bp, synthetic construct; identical to SEQ ID NO: 18834
  misc_feature 1..43: note = Probe
  source 1..43: mol_type = other DNA

SEQ ID NO: 46964 - DNA, 45 bp, synthetic construct; identical to SEQ ID NO: 4886
  misc_feature 1..45: note = Probe
  source 1..45: mol_type = other DNA

SEQ ID NO: 46965 - DNA, 48 bp, synthetic construct; identical to SEQ ID NO: 4887
  misc_feature 1..48: note = Probe
  source 1..48: mol_type = other DNA

SEQ ID NO: 46966 - DNA, 49 bp, synthetic construct; identical to SEQ ID NO: 4888
  misc_feature 1..49: note = Probe
  source 1..49: mol_type = other DNA

SEQ ID NO: 46967 - DNA, 50 bp, synthetic construct; identical to SEQ ID NO: 4889
  misc_feature 1..50: note = Probe
  source 1..50: mol_type = other DNA

SEQ ID NO: 46968 - DNA, 50 bp, synthetic construct; identical to SEQ ID NO: 18839
  misc_feature 1..50: note = Probe
  source 1..50: mol_type = other DNA

SEQ ID NO: 46969 - DNA, 45 bp, synthetic construct; identical to SEQ ID NO: 4890
  misc_feature 1..45: note = Probe
  source 1..45: mol_type = other DNA

SEQ ID NO: 46970 - DNA, 50 bp, synthetic construct; identical to SEQ ID NO: 18841
  misc_feature 1..50: note = Probe
  source 1..50: mol_type = other DNA

SEQ ID NO: 46971 - DNA, 50 bp, synthetic construct; identical to SEQ ID NO: 4891
  misc_feature 1..50: note = Probe
  source 1..50: mol_type = other DNA

SEQ ID NO: 46972 - DNA, 20 bp, synthetic construct
  misc_feature 1..20: note = Probe
  source 1..20: mol_type = other DNA
ccttaattttaataatcaac

SEQ ID NO: 46973 - DNA, 17 bp, synthetic construct
  misc_feature 1..17: note = Probe
  source 1..17: mol_type = other DNA
ccttccaagcagttgac

SEQ ID NO: 46974 - DNA, 18 bp, synthetic construct
  misc_feature 1..18: note = Probe
  source 1..18: mol_type = other DNA
ccttccaagcagttgacc

SEQ ID NO: 46975 - DNA, 22 bp, synthetic construct
  misc_feature 1..22: note = Probe
  source 1..22: mol_type = other DNA
ccttccaagcagttgacccggg

SEQ ID NO: 46976 - DNA, 23 bp, synthetic construct
  misc_feature 1..23: note = Probe
  source 1..23: mol_type = other DNA
ccttccaagcagttgacccgggt

SEQ ID NO: 46977 - DNA, 25 bp, synthetic construct
  misc_feature 1..25: note = Probe
  source 1..25: mol_type = other DNA
ccttccaagcagttgacccgggttc

SEQ ID NO: 46978 - DNA, 45 bp, synthetic construct; identical to SEQ ID NO: 39289
  misc_feature 1..45: note = Probe
  source 1..45: mol_type = other DNA

SEQ ID NO: 46979 - DNA, 45 bp, synthetic construct; identical to SEQ ID NO: 39294
  misc_feature 1..45: note = Probe
  source 1..45: mol_type = other DNA

SEQ ID NO: 46980 - DNA, 16 bp, synthetic construct
  misc_feature 1..16: note = Probe
  source 1..16: mol_type = other DNA
ccttcgatagctcagc

SEQ ID NO: 46981 - DNA, 17 bp, synthetic construct
  misc_feature 1..17: note = Probe
  source 1..17: mol_type = other DNA
ccttcgatagctcagct

SEQ ID NO: 46982 - DNA, 19 bp, synthetic construct
  misc_feature 1..19: note = Probe
  source 1..19: mol_type = other DNA
ccttcgatagctcagctgg

SEQ ID NO: 46983 - DNA, 16 bp, synthetic construct
  misc_feature 1..16: note = Probe
  source 1..16: mol_type = other DNA
ccttcgatagctcagt

SEQ ID NO: 46984 - DNA, 19 bp, synthetic construct
  misc_feature 1..19: note = Probe
  source 1..19: mol_type = other DNA
ccttcgatagctcagttgg

SEQ ID NO: 46985 - DNA, 20 bp, synthetic construct
  misc_feature 1..20: note = Probe
  source 1..20: mol_type = other DNA
ccttcgatagctcagttggt

SEQ ID NO: 46986 - DNA, 21 bp, synthetic construct
  misc_feature 1..21: note = Probe
  source 1..21: mol_type = other DNA
ccttcgatagctcagttggta

SEQ ID NO: 46987 - DNA, 22 bp, synthetic construct
  misc_feature 1..22: note = Probe
  source 1..22: mol_type = other DNA
ccttcgatagctcagttggtag

SEQ ID NO: 46988 - DNA, 23 bp, synthetic construct
  misc_feature 1..23: note = Probe
  source 1..23: mol_type = other DNA
ccttcgatagctcagttggtaga

SEQ ID NO: 46989 - DNA, 27 bp, synthetic construct
  misc_feature 1..27: note = Probe
  source 1..27: mol_type = other DNA
ccttttaagttaaagattaagagaacc

SEQ ID NO: 46990 - DNA, 45 bp, synthetic construct
  misc_feature 1..45: note = Probe
  source 1..45: mol_type = other DNA
ccttttaagttaaagattaagagaaccaacacctctttacagtga

SEQ ID NO: 46991 - DNA, 50 bp, synthetic construct; identical to SEQ ID NO: 4905
  misc_feature 1..50: note = Probe
  source 1..50: mol_type = other DNA

SEQ ID NO: 46992 - DNA, 23 bp, synthetic construct
  misc_feature 1..23: note = Probe
  source 1..23: mol_type = other DNA
ccttttttcccggcggcgggaga

SEQ ID NO: 46993 - DNA, 24 bp, synthetic construct
  misc_feature 1..24: note = Probe
  source 1..24: mol_type = other DNA
ccttttttcccggcggcgggagaa

SEQ ID NO: 46994 - DNA, 26 bp, synthetic construct
  misc_feature 1..26: note = Probe
  source 1..26: mol_type = other DNA
ccttttttcccggcggcgggagaagt

SEQ ID NO: 46995 - DNA, 24 bp, synthetic construct
  misc_feature 1..24: note = Probe
  source 1..24: mol_type = other DNA
cgaaaatgttggttatacccttcc

SEQ ID NO: 46996 - DNA, 25 bp, synthetic construct
  misc_feature 1..25: note = Probe
  source 1..25: mol_type = other DNA
cgaaaatgttggttatacccttccc

SEQ ID NO: 46997 - DNA, 26 bp, synthetic construct
  misc_feature 1..26: note = Probe
  source 1..26: mol_type = other DNA
cgaaaatgttggttatacccttcccg

SEQ ID NO: 46998 - DNA, 27 bp, synthetic construct
  misc_feature 1..27: note = Probe
  source 1..27: mol_type = other DNA
cgaaaatgttggttatacccttcccgt

SEQ ID NO: 46999 - DNA, 32 bp, synthetic construct; identical to SEQ ID NO: 4915
  misc_feature 1..32: note = Probe
  source 1..32: mol_type = other DNA

SEQ ID NO: 47000 - DNA, 33 bp, synthetic construct; identical to SEQ ID NO: 4916
  misc_feature 1..33: note = Probe
  source 1..33: mol_type = other DNA

SEQ ID NO: 47001 - DNA, 34 bp, synthetic construct; identical to SEQ ID NO: 4917
  misc_feature 1..34: note = Probe
  source 1..34: mol_type = other DNA

SEQ ID NO: 47002 - DNA, 17 bp, synthetic construct
  misc_feature 1..17: note = Probe
  source 1..17: mol_type = other DNA
cgaaaccatcctctgct

SEQ ID NO: 47003 - DNA, 21 bp, synthetic construct
  misc_feature 1..21: note = Probe
  source 1..21: mol_type = other DNA
cgaaaccatcctctgctaggt

SEQ ID NO: 47004 - DNA, 18 bp, synthetic construct
  misc_feature 1..18: note = Probe
  source 1..18: mol_type = other DNA
cgaaaccgggcggaaaca

SEQ ID NO: 47005 - DNA, 21 bp, synthetic construct
  misc_feature 1..21: note = Probe
  source 1..21: mol_type = other DNA
cgaaaccgggcggaaacacct

SEQ ID NO: 47006 - DNA, 30 bp, synthetic construct
  misc_feature 1..30: note = Probe
  source 1..30: mol_type = other DNA
cgaaaggtccccggttcgaaaccgggcgga

SEQ ID NO: 47007 - DNA, 34 bp, synthetic construct
  misc_feature 1..34: note = Probe
  source 1..34: mol_type = other DNA
cgaaaggtccccggttcgaaaccgggcggaaaca

SEQ ID NO: 47008 - DNA, 36 bp, synthetic construct
  misc_feature 1..36: note = Probe
  source 1..36: mol_type = other DNA
cgaaaggtccccggttcgaaaccgggcggaaacacc

SEQ ID NO: 47009 - DNA, 37 bp, synthetic construct; identical to SEQ ID NO: 4922
  misc_feature 1..37: note = Probe
  source 1..37: mol_type = other DNA

SEQ ID NO: 47010 - DNA, 35 bp, synthetic construct
  misc_feature 1..35: note = Probe
  source 1..35: mol_type = other DNA
cgaaaggttggtggttcgagcccacccagggacgc

SEQ ID NO: 47011 - DNA, 36 bp, synthetic construct; identical to SEQ ID NO: 18883
  misc_feature 1..36: note = Probe
  source 1..36: mol_type = other DNA

SEQ ID NO: 47012 - DNA, 37 bp, synthetic construct; identical to SEQ ID NO: 4923
  misc_feature 1..37: note = Probe
  source 1..37: mol_type = other DNA

SEQ ID NO: 47013 - DNA, 32 bp, synthetic construct
  misc_feature 1..32: note = Probe
  source 1..32: mol_type = other DNA
cgaaaggttggtggttcgatcccacccaggga

SEQ ID NO: 47014 - DNA, 50 bp, synthetic construct
  misc_feature 1..50: note = Probe
  source 1..50: mol_type = other DNA
cgaaccagagtgtagcttaacacaaagcacccaacttacacttaggagat

SEQ ID NO: 47015 - DNA, 21 bp, synthetic construct
  misc_feature 1..21: note = Probe
  source 1..21: mol_type = other DNA
cgaaccccgtccgtgcctgat

SEQ ID NO: 47016 - DNA, 19 bp, synthetic construct
  misc_feature 1..19: note = Probe
  source 1..19: mol_type = other DNA
cgaacctcagagggggcaa

SEQ ID NO: 47017 - DNA, 19 bp, synthetic construct
  misc_feature 1..19: note = Probe
  source 1..19: mol_type = other DNA
cgaacctcagagggggcag

SEQ ID NO: 47018 - DNA, 21 bp, synthetic construct
  misc_feature 1..21: note = Probe
  source 1..21: mol_type = other DNA
cgaacctcagagggggcagct

SEQ ID NO: 47019 - DNA, 28 bp, synthetic construct
  misc_feature 1..28: note = Probe
  source 1..28: mol_type = other DNA
cgaacctcagagggggcagctgccattt

SEQ ID NO: 47020 - DNA, 20 bp, synthetic construct
  misc_feature 1..20: note = Probe
  source 1..20: mol_type = other DNA
cgaagaagcagcttcaaacc

SEQ ID NO: 47021 - DNA, 27 bp, synthetic construct
  misc_feature 1..27: note = Probe
  source 1..27: mol_type = other DNA
cgaagaagcagcttcaaacctgccggg

SEQ ID NO: 47022 - DNA, 28 bp, synthetic construct
  misc_feature 1..28: note = Probe
  source 1..28: mol_type = other DNA
cgaagaagcagcttcaaacctgccgggg

SEQ ID NO: 47023 - DNA, 29 bp, synthetic construct
  misc_feature 1..29: note = Probe
  source 1..29: mol_type = other DNA
cgaagaagcagcttcaaacctgccggggc

SEQ ID NO: 47024 - DNA, 30 bp, synthetic construct; identical to SEQ ID NO: 4930
  misc_feature 1..30: note = Probe
  source 1..30: mol_type = other DNA

SEQ ID NO: 47025 - DNA, 31 bp, synthetic construct; identical to SEQ ID NO: 4931
  misc_feature 1..31: note = Probe
  source 1..31: mol_type = other DNA

SEQ ID NO: 47026 - DNA, 32 bp, synthetic construct; identical to SEQ ID NO: 4932
  misc_feature 1..32: note = Probe
  source 1..32: mol_type = other DNA

SEQ ID NO: 47027 - DNA, 33 bp, synthetic construct; identical to SEQ ID NO: 4933
  misc_feature 1..33: note = Probe
  source 1..33: mol_type = other DNA

SEQ ID NO: 47028 - DNA, 34 bp, synthetic construct; identical to SEQ ID NO: 4934
  misc_feature 1..34: note = Probe
  source 1..34: mol_type = other DNA

SEQ ID NO: 47029 - DNA, 36 bp, synthetic construct; identical to SEQ ID NO: 4936
  misc_feature 1..36: note = Probe
  source 1..36: mol_type = other DNA

SEQ ID NO: 47030 - DNA, 44 bp, synthetic construct
  misc_feature 1..44: note = Probe
  source 1..44: mol_type = other DNA
cgaagaagcagcttcaaacctgccggggcttctcccgccttttt

SEQ ID NO: 47031 - DNA, 21 bp, synthetic construct
  misc_feature 1..21: note = Probe
  source 1..21: mol_type = other DNA
cgaatcacgtcggggtcaaac

SEQ ID NO: 47032 - DNA, 18 bp, synthetic construct
  misc_feature 1..18: note = Probe
  source 1..18: mol_type = other DNA
cgaatcccaccgctgcca

SEQ ID NO: 47033 - DNA, 20 bp, synthetic construct
  misc_feature 1..20: note = Probe
  source 1..20: mol_type = other DNA
cgaatcccaccgctgccaca

SEQ ID NO: 47034 - DNA, 21 bp, synthetic construct
  misc_feature 1..21: note = Probe
  source 1..21: mol_type = other DNA
cgaatcccaccgctgccacac

SEQ ID NO: 47035 - DNA, 21 bp, synthetic construct
  misc_feature 1..21: note = Probe
  source 1..21: mol_type = other DNA
cgaatcccaccgctgccaggt

SEQ ID NO: 47036 - DNA, 18 bp, synthetic construct
  misc_feature 1..18: note = Probe
  source 1..18: mol_type = other DNA
cgaatcccactcctgaca

SEQ ID NO: 47037 - DNA, 18 bp, synthetic construct
  misc_feature 1..18: note = Probe
  source 1..18: mol_type = other DNA
cgaatcccacttctgaca

SEQ ID NO: 47038 - DNA, 21 bp, synthetic construct
  misc_feature 1..21: note = Probe
  source 1..21: mol_type = other DNA
cgaatcccacttctgacacaa

SEQ ID NO: 47039 - DNA, 26 bp, synthetic construct
  misc_feature 1..26: note = Probe
  source 1..26: mol_type = other DNA
cgaatcccacttctgacacatacttt

SEQ ID NO: 47040 - DNA, 19 bp, synthetic construct
  misc_feature 1..19: note = Probe
  source 1..19: mol_type = other DNA
cgaatcccagcggggcctg

SEQ ID NO: 47041 - DNA, 19 bp, synthetic construct
  misc_feature 1..19: note = Probe
  source 1..19: mol_type = other DNA
cgaatcccagcggggcctt

SEQ ID NO: 47042 - DNA, 21 bp, synthetic construct
  misc_feature 1..21: note = Probe
  source 1..21: mol_type = other DNA
cgaatcccagcggtgcctccg

SEQ ID NO: 47043 - DNA, 16 bp, synthetic construct
  misc_feature 1..16: note = Probe
  source 1..16: mol_type = other DNA
cgaatcccatcctcgt

SEQ ID NO: 47044 - DNA, 20 bp, synthetic construct
  misc_feature 1..20: note = Probe
  source 1..20: mol_type = other DNA
cgaatcccatcctcgtcgct

SEQ ID NO: 47045 - DNA, 21 bp, synthetic construct
  misc_feature 1..21: note = Probe
  source 1..21: mol_type = other DNA
cgaatccggctcgaaggacga

SEQ ID NO: 47046 - DNA, 20 bp, synthetic construct
  misc_feature 1..20: note = Probe
  source 1..20: mol_type = other DNA
cgaatcctgccgactacggc

SEQ ID NO: 47047 - DNA, 21 bp, synthetic construct
  misc_feature 1..21: note = Probe
  source 1..21: mol_type = other DNA
cgaatcctgccgactacggca

SEQ ID NO: 47048 - DNA, 20 bp, synthetic construct
  misc_feature 1..20: note = Probe
  source 1..20: mol_type = other DNA
cgaatcctgccgactacgtc

SEQ ID NO: 47049 - DNA, 21 bp, synthetic construct
  misc_feature 1..21: note = Probe
  source 1..21: mol_type = other DNA
cgaatcctgccgactacgtca

SEQ ID NO: 47050 - DNA, 21 bp, synthetic construct
  misc_feature 1..21: note = Probe
  source 1..21: mol_type = other DNA
cgaatcctgctcacagcgtca

SEQ ID NO: 47051 - DNA, 50 bp, synthetic construct
  misc_feature 1..50: note = Probe
  source 1..50: mol_type = other DNA
cgaatgatttcgactcattaaattatgataatcatatttaccaaatgccc

SEQ ID NO: 47052 - DNA, 17 bp, synthetic construct
  misc_feature 1..17: note = Probe
  source 1..17: mol_type = other DNA
cgaccccttatttaccg

SEQ ID NO: 47053 - DNA, 28 bp, synthetic construct
  misc_feature 1..28: note = Probe
  source 1..28: mol_type = other DNA
cgactcattaaattatgataatcatatt

SEQ ID NO: 47054 - DNA, 32 bp, synthetic construct; identical to SEQ ID NO: 4942
  misc_feature 1..32: note = Probe
  source 1..32: mol_type = other DNA

SEQ ID NO: 47055 - DNA, 35 bp, synthetic construct; identical to SEQ ID NO: 4943
  misc_feature 1..35: note = Probe
  source 1..35: mol_type = other DNA

SEQ ID NO: 47056 - DNA, 36 bp, synthetic construct
  misc_feature 1..36: note = Probe
  source 1..36: mol_type = other DNA
cgactcattaaattatgataatcatatttaccaaat

SEQ ID NO: 47057 - DNA, 37 bp, synthetic construct; identical to SEQ ID NO: 4944
  misc_feature 1..37: note = Probe
  source 1..37: mol_type = other DNA

SEQ ID NO: 47058 - DNA, 38 bp, synthetic construct
  misc_feature 1..38: note = Probe
  source 1..38: mol_type = other DNA
cgactcattaaattatgataatcatatttaccaaatgc

SEQ ID NO: 47059 - DNA, 21 bp, synthetic construct
  misc_feature 1..21: note = Probe
  source 1..21: mol_type = other DNA
cgactcccggtatgggaacaa

SEQ ID NO: 47060 - DNA, 18 bp, synthetic construct
  misc_feature 1..18: note = Probe
  source 1..18: mol_type = other DNA
cgactcccggtgtgggaa

SEQ ID NO: 47061 - DNA, 20 bp, synthetic construct
  misc_feature 1..20: note = Probe
  source 1..20: mol_type = other DNA
cgactcccggtgtgggaacg

SEQ ID NO: 47062 - DNA, 21 bp, synthetic construct
  misc_feature 1..21: note = Probe
  source 1..21: mol_type = other DNA
cgactcccggtgtgggaacgc

SEQ ID NO: 47063 - DNA, 34 bp, synthetic construct; identical to SEQ ID NO: 18942
  misc_feature 1..34: note = Probe
  source 1..34: mol_type = other DNA

SEQ ID NO: 47064 - DNA, 35 bp, synthetic construct; identical to SEQ ID NO: 13093
  misc_feature 1..35: note = Probe
  source 1..35: mol_type = other DNA

SEQ ID NO: 47065 - DNA, 36 bp, synthetic construct; identical to SEQ ID NO: 18943
  misc_feature 1..36: note = Probe
  source 1..36: mol_type = other DNA

SEQ ID NO: 47066 - DNA, 37 bp, synthetic construct; identical to SEQ ID NO: 18944
  misc_feature 1..37: note = Probe
  source 1..37: mol_type = other DNA

SEQ ID NO: 47067 - DNA, 16 bp, synthetic construct
  misc_feature 1..16: note = Probe
  source 1..16: mol_type = other DNA
cgagcccacccaggga

SEQ ID NO: 47068 - DNA, 21 bp, synthetic construct
  misc_feature 1..21: note = Probe
  source 1..21: mol_type = other DNA
cgagcccacccagggacgcct

SEQ ID NO: 47069 - DNA, 32 bp, synthetic construct
  misc_feature 1..32: note = Probe
  source 1..32: mol_type = other DNA
cgagccccacgttgggcgcgggttgtaacttt

SEQ ID NO: 47070 - DNA, 26 bp, synthetic construct
  misc_feature 1..26: note = Probe
  source 1..26: mol_type = other DNA
cgagccccacgttgggcgctgtgttt

SEQ ID NO: 47071 - DNA, 18 bp, synthetic construct
  misc_feature 1..18: note = Probe
  source 1..18: mol_type = other DNA
cgagccccagtggaacca

SEQ ID NO: 47072 - DNA, 20 bp, synthetic construct
  misc_feature 1..20: note = Probe
  source 1..20: mol_type = other DNA
cgagccccagtggaaccacg

SEQ ID NO: 47073 - DNA, 35 bp, synthetic construct; identical to SEQ ID NO: 18971
  misc_feature 1..35: note = Probe
  source 1..35: mol_type = other DNA

SEQ ID NO: 47074 - DNA, 32 bp, synthetic construct
  misc_feature 1..32: note = Probe
  source 1..32: mol_type = other DNA
cgaggttgtgagttcgatcctcacctggagca

SEQ ID NO: 47075 - DNA, 21 bp, synthetic construct
  misc_feature 1..21: note = Probe
  source 1..21: mol_type = other DNA
cgagtcccatctgggtcgcgt

SEQ ID NO: 47076 - DNA, 21 bp, synthetic construct
  misc_feature 1..21: note = Probe
  source 1..21: mol_type = other DNA
cgagtcccttcgtggtcgttg

SEQ ID NO: 47077 - DNA, 18 bp, synthetic construct
  misc_feature 1..18: note = Probe
  source 1..18: mol_type = other DNA
cgatccccagcatctcca

SEQ ID NO: 47078 - DNA, 25 bp, synthetic construct
  misc_feature 1..25: note = Probe
  source 1..25: mol_type = other DNA
cgatccccagcatctccagtgtttt

SEQ ID NO: 47079 - DNA, 20 bp, synthetic construct
  misc_feature 1..20: note = Probe
  source 1..20: mol_type = other DNA
cgatccccggcatctccatt

SEQ ID NO: 47080 - DNA, 21 bp, synthetic construct
  misc_feature 1..21: note = Probe
  source 1..21: mol_type = other DNA
cgatccccggcatctccattg

SEQ ID NO: 47081 - DNA, 21 bp, synthetic construct
  misc_feature 1..21: note = Probe
  source 1..21: mol_type = other DNA
cgatccccgtacgggccacga

SEQ ID NO: 47082 - DNA, 21 bp, synthetic construct
  misc_feature 1..21: note = Probe
  source 1..21: mol_type = other DNA
cgatccccgtacgggccactg

SEQ ID NO: 47083 - DNA, 18 bp, synthetic construct
  misc_feature 1..18: note = Probe
  source 1..18: mol_type = other DNA
cgatcccgggtttcggca

SEQ ID NO: 47084 - DNA, 29 bp, synthetic construct
  misc_feature 1..29: note = Probe
  source 1..29: mol_type = other DNA
cgatccgagttcaaatctcggtggaacct

SEQ ID NO: 47085 - DNA, 32 bp, synthetic construct; identical to SEQ ID NO: 4954
  misc_feature 1..32: note = Probe
  source 1..32: mol_type = other DNA

SEQ ID NO: 47086 - DNA, 26 bp, synthetic construct
  misc_feature 1..26: note = Probe
  source 1..26: mol_type = other DNA
cgatccgagttcaaatctcggtggga

SEQ ID NO: 47087 - DNA, 27 bp, synthetic construct
  misc_feature 1..27: note = Probe
  source 1..27: mol_type = other DNA
cgatccgagttcaaatctcggtgggac

SEQ ID NO: 47088 - DNA, 29 bp, synthetic construct
  misc_feature 1..29: note = Probe
  source 1..29: mol_type = other DNA
cgatccgagttcaaatctcggtgggacct

SEQ ID NO: 47089 - DNA, 32 bp, synthetic construct; identical to SEQ ID NO: 39334
  misc_feature 1..32: note = Probe
  source 1..32: mol_type = other DNA

SEQ ID NO: 47090 - DNA, 21 bp, synthetic construct
  misc_feature 1..21: note = Probe
  source 1..21: mol_type = other DNA
cgatcctcacacggggcacaa

SEQ ID NO: 47091 - DNA, 27 bp, synthetic construct
  misc_feature 1..27: note = Probe
  source 1..27: mol_type = other DNA
cgatcctcacacggggcacaataattt

SEQ ID NO: 47092 - DNA, 20 bp, synthetic construct
  misc_feature 1..20: note = Probe
  source 1..20: mol_type = other DNA
cgatgcccgcatcctccact

SEQ ID NO: 47093 - DNA, 21 bp, synthetic construct
  misc_feature 1..21: note = Probe
  source 1..21: mol_type = other DNA
cgatgcccgcatcctccactc

SEQ ID NO: 47094 - DNA, 25 bp, synthetic construct
  misc_feature 1..25: note = Probe
  source 1..25: mol_type = other DNA
cgatggatcgaaaccatcctctgct

SEQ ID NO: 47095 - DNA, 26 bp, synthetic construct
  misc_feature 1..26: note = Probe
  source 1..26: mol_type = other DNA
cgatggatcgaaaccatcctctgcta

SEQ ID NO: 47096 - DNA, 28 bp, synthetic construct
  misc_feature 1..28: note = Probe
  source 1..28: mol_type = other DNA
cgatggatcgaaaccatcctctgctagg

SEQ ID NO: 47097 - DNA, 29 bp, synthetic construct
  misc_feature 1..29: note = Probe
  source 1..29: mol_type = other DNA
cgatggatcgaaaccatcctctgctaggt

SEQ ID NO: 47098 - DNA, 28 bp, synthetic construct
  misc_feature 1..28: note = Probe
  source 1..28: mol_type = other DNA
cgatggatcgaaaccatcctctgctatc

SEQ ID NO: 47099 - DNA, 28 bp, synthetic construct
  misc_feature 1..28: note = Probe
  source 1..28: mol_type = other DNA
cgatggatcgaaaccatcctctgctatt

SEQ ID NO: 47100 - DNA, 18 bp, synthetic construct
  misc_feature 1..18: note = Probe
  source 1..18: mol_type = other DNA
cgattccccgacggggag

SEQ ID NO: 47101 - DNA, 19 bp, synthetic construct
  misc_feature 1..19: note = Probe
  source 1..19: mol_type = other DNA
cgattccccgacggggaga

SEQ ID NO: 47102 - DNA, 19 bp, synthetic construct
  misc_feature 1..19: note = Probe
  source 1..19: mol_type = other DNA
cgattccccgacggggagg

SEQ ID NO: 47103 - DNA, 21 bp, synthetic construct
  misc_feature 1..21: note = Probe
  source 1..21: mol_type = other DNA
cgattccccgacggggaggca

SEQ ID NO: 47104 - DNA, 21 bp, synthetic construct
  misc_feature 1..21: note = Probe
  source 1..21: mol_type = other DNA
cgattcccggccaacgcaagt

SEQ ID NO: 47105 - DNA, 21 bp, synthetic construct
  misc_feature 1..21: note = Probe
  source 1..21: mol_type = other DNA
cgattcccggccaacgcagtg

SEQ ID NO: 47106 - DNA, 21 bp, synthetic construct
  misc_feature 1..21: note = Probe
  source 1..21: mol_type = other DNA
cgattcccggccaatgcacga

SEQ ID NO: 47107 - DNA, 21 bp, synthetic construct
  misc_feature 1..21: note = Probe
  source 1..21: mol_type = other DNA
cgattcccggccaatgcagca

SEQ ID NO: 47108 - DNA, 21 bp, synthetic construct
  misc_feature 1..21: note = Probe
  source 1..21: mol_type = other DNA
cgattcccggcccatgcagca

SEQ ID NO: 47109 - DNA, 21 bp, synthetic construct
  misc_feature 1..21: note = Probe
  source 1..21: mol_type = other DNA
cgattcccgggcggcgcactt

SEQ ID NO: 47110 - DNA, 21 bp, synthetic construct
  misc_feature 1..21: note = Probe
  source 1..21: mol_type = other DNA
cgattcccggtcagggaacaa

SEQ ID NO: 47111 - DNA, 21 bp, synthetic construct
  misc_feature 1..21: note = Probe
  source 1..21: mol_type = other DNA
cgattcccggtcatggaacca

SEQ ID NO: 47112 - DNA, 21 bp, synthetic construct
  misc_feature 1..21: note = Probe
  source 1..21: mol_type = other DNA
cgattcctggtcagggaacca

SEQ ID NO: 47113 - DNA, 20 bp, synthetic construct
  misc_feature 1..20: note = Probe
  source 1..20: mol_type = other DNA
cgattccttccttttttgtc

SEQ ID NO: 47114 - DNA, 19 bp, synthetic construct
  misc_feature 1..19: note = Probe
  source 1..19: mol_type = other DNA
cgattctcatagtcctaga

SEQ ID NO: 47115 - DNA, 20 bp, synthetic construct
  misc_feature 1..20: note = Probe
  source 1..20: mol_type = other DNA
cgattctcatagtcctagaa

SEQ ID NO: 47116 - DNA, 21 bp, synthetic construct
  misc_feature 1..21: note = Probe
  source 1..21: mol_type = other DNA
cgattctcatagtcctagaaa

SEQ ID NO: 47117 - DNA, 26 bp, synthetic construct
  misc_feature 1..26: note = Probe
  source 1..26: mol_type = other DNA
cgcacaggttcgaatcctgttcgtga

SEQ ID NO: 47118 - DNA, 37 bp, synthetic construct; identical to SEQ ID NO: 13098
  misc_feature 1..37: note = Probe
  source 1..37: mol_type = other DNA

SEQ ID NO: 47119 - DNA, 38 bp, synthetic construct; identical to SEQ ID NO: 4966
  misc_feature 1..38: note = Probe
  source 1..38: mol_type = other DNA

SEQ ID NO: 47120 - DNA, 39 bp, synthetic construct; identical to SEQ ID NO: 4967
  misc_feature 1..39: note = Probe
  source 1..39: mol_type = other DNA

SEQ ID NO: 47121 - DNA, 39 bp, synthetic construct; identical to SEQ ID NO: 4968
  misc_feature 1..39: note = Probe
  source 1..39: mol_type = other DNA

SEQ ID NO: 47122 - DNA, 31 bp, synthetic construct; identical to SEQ ID NO: 19030
  misc_feature 1..31: note = Probe
  source 1..31: mol_type = other DNA

SEQ ID NO: 47123 - DNA, 32 bp, synthetic construct; identical to SEQ ID NO: 4969
  misc_feature 1..32: note = Probe
  source 1..32: mol_type = other DNA

SEQ ID NO: 47124 - DNA, 33 bp, synthetic construct
  misc_feature 1..33: note = Probe
  source 1..33: mol_type = other DNA
cgcagcaacctcggttcgaatccgagtcacggc

SEQ ID NO: 47125 - DNA, 34 bp, synthetic construct
  misc_feature 1..34: note = Probe
  source 1..34: mol_type = other DNA
cgcagcaacctcggttcgaatccgagtcacggca

SEQ ID NO: 47126 - DNA, 35 bp, synthetic construct
  misc_feature 1..35: note = Probe
  source 1..35: mol_type = other DNA
cgcagcaacctcggttcgaatccgagtcacggcaa

SEQ ID NO: 47127 - DNA, 36 bp, synthetic construct; identical to SEQ ID NO: 19032
  misc_feature 1..36: note = Probe
  source 1..36: mol_type = other DNA

SEQ ID NO: 47128 - DNA, 37 bp, synthetic construct; identical to SEQ ID NO: 4970
  misc_feature 1..37: note = Probe
  source 1..37: mol_type = other DNA

SEQ ID NO: 47129 - DNA, 36 bp, synthetic construct; identical to SEQ ID NO: 19033
  misc_feature 1..36: note = Probe
  source 1..36: mol_type = other DNA

SEQ ID NO: 47130 - DNA, 37 bp, synthetic construct; identical to SEQ ID NO: 4972
  misc_feature 1..37: note = Probe
  source 1..37: mol_type = other DNA

SEQ ID NO: 47131 - DNA, 36 bp, synthetic construct; identical to SEQ ID NO: 19035
  misc_feature 1..36: note = Probe
  source 1..36: mol_type = other DNA

SEQ ID NO: 47132 - DNA, 37 bp, synthetic construct; identical to SEQ ID NO: 4973
  misc_feature 1..37: note = Probe
  source 1..37: mol_type = other DNA

SEQ ID NO: 47133 - DNA, 23 bp, synthetic construct
  misc_feature 1..23: note = Probe
  source 1..23: mol_type = other DNA
cgcataaaacttaaaactttaca

SEQ ID NO: 47134 - DNA, 28 bp, synthetic construct
  misc_feature 1..28: note = Probe
  source 1..28: mol_type = other DNA
cgcataaaacttaaaactttacagtcag

SEQ ID NO: 47135 - DNA, 30 bp, synthetic construct; identical to SEQ ID NO: 30334
  misc_feature 1..30: note = Probe
  source 1..30: mol_type = other DNA

SEQ ID NO: 47136 - DNA, 31 bp, synthetic construct
  misc_feature 1..31: note = Probe
  source 1..31: mol_type = other DNA
cgcataaaacttaaaactttacagtcagagg

SEQ ID NO: 47137 - DNA, 35 bp, synthetic construct
  misc_feature 1..35: note = Probe
  source 1..35: mol_type = other DNA
cgcataaaacttaaaactttacagtcagaggttca

SEQ ID NO: 47138 - DNA, 44 bp, synthetic construct; identical to SEQ ID NO: 717
  misc_feature 1..44: note = Probe
  source 1..44: mol_type = other DNA

SEQ ID NO: 47139 - DNA, 50 bp, synthetic construct; identical to SEQ ID NO: 4981
  misc_feature 1..50: note = Probe
  source 1..50: mol_type = other DNA

SEQ ID NO: 47140 - DNA, 32 bp, synthetic construct
  misc_feature 1..32: note = Probe
  source 1..32: mol_type = other DNA
cgcattggtggttcagtggtagaattctcgcc

SEQ ID NO: 47141 - DNA, 33 bp, synthetic construct; identical to SEQ ID NO: 4982
  misc_feature 1..33: note = Probe
  source 1..33: mol_type = other DNA

SEQ ID NO: 47142 - DNA, 32 bp, synthetic construct; identical to SEQ ID NO: 19041
  misc_feature 1..32: note = Probe
  source 1..32: mol_type = other DNA

SEQ ID NO: 47143 - DNA, 35 bp, synthetic construct
  misc_feature 1..35: note = Probe
  source 1..35: mol_type = other DNA
cgccaaggtcgcgggttcgatccccgtacgggcca

SEQ ID NO: 47144 - DNA, 38 bp, synthetic construct; identical to SEQ ID NO: 19045
  misc_feature 1..38: note = Probe
  source 1..38: mol_type = other DNA

SEQ ID NO: 47145 - DNA, 38 bp, synthetic construct; identical to SEQ ID NO: 19046
  misc_feature 1..38: note = Probe
  source 1..38: mol_type = other DNA

SEQ ID NO: 47146 - DNA, 32 bp, synthetic construct; identical to SEQ ID NO: 19053
  misc_feature 1..32: note = Probe
  source 1..32: mol_type = other DNA

SEQ ID NO: 47147 - DNA, 33 bp, synthetic construct; identical to SEQ ID NO: 719
  misc_feature 1..33: note = Probe
  source 1..33: mol_type = other DNA

SEQ ID NO: 47148 - DNA, 34 bp, synthetic construct; identical to SEQ ID NO: 720
  misc_feature 1..34: note = Probe
  source 1..34: mol_type = other DNA

SEQ ID NO: 47149 - DNA, 35 bp, synthetic construct; identical to SEQ ID NO: 19056
  misc_feature 1..35: note = Probe
  source 1..35: mol_type = other DNA

SEQ ID NO: 47150 - DNA, 36 bp, synthetic construct; identical to SEQ ID NO: 19057
  misc_feature 1..36: note = Probe
  source 1..36: mol_type = other DNA

SEQ ID NO: 47151 - DNA, 32 bp, synthetic construct
  misc_feature 1..32: note = Probe
  source 1..32: mol_type = other DNA
cgcccggctagctcagtcggtagagcatgaga

SEQ ID NO: 47152 - DNA, 32 bp, synthetic construct; identical to SEQ ID NO: 39346
  misc_feature 1..32: note = Probe
  source 1..32: mol_type = other DNA

SEQ ID NO: 47153 - DNA, 33 bp, synthetic construct
  misc_feature 1..33: note = Probe
  source 1..33: mol_type = other DNA
cgcccggctagctcagtcggtagagcatgggac

SEQ ID NO: 47154 - DNA, 34 bp, synthetic construct; identical to SEQ ID NO: 721
  misc_feature 1..34: note = Probe
  source 1..34: mol_type = other DNA

SEQ ID NO: 47155 - DNA, 32 bp, synthetic construct; identical to SEQ ID NO: 30351
  misc_feature 1..32: note = Probe
  source 1..32: mol_type = other DNA

SEQ ID NO: 47156 - DNA, 34 bp, synthetic construct; identical to SEQ ID NO: 19062
  misc_feature 1..34: note = Probe
  source 1..34: mol_type = other DNA

SEQ ID NO: 47157 - DNA, 35 bp, synthetic construct; identical to SEQ ID NO: 4985
  misc_feature 1..35: note = Probe
  source 1..35: mol_type = other DNA

SEQ ID NO: 47158 - DNA, 35 bp, synthetic construct; identical to SEQ ID NO: 4986
  misc_feature 1..35: note = Probe
  source 1..35: mol_type = other DNA

SEQ ID NO: 47159 - DNA, 35 bp, synthetic construct; identical to SEQ ID NO: 4989
  misc_feature 1..35: note = Probe
  source 1..35: mol_type = other DNA

SEQ ID NO: 47160 - DNA, 37 bp, synthetic construct; identical to SEQ ID NO: 4990
  misc_feature 1..37: note = Probe
  source 1..37: mol_type = other DNA

SEQ ID NO: 47161 - DNA, 25 bp, synthetic construct
  misc_feature 1..25: note = Probe
  source 1..25: mol_type = other DNA
cgccgctggtgtagtggtatcatgc

SEQ ID NO: 47162 - DNA, 32 bp, synthetic construct; identical to SEQ ID NO: 723
  misc_feature 1..32: note = Probe
  source 1..32: mol_type = other DNA

SEQ ID NO: 47163 - DNA, 33 bp, synthetic construct; identical to SEQ ID NO: 4993
  misc_feature 1..33: note = Probe
  source 1..33: mol_type = other DNA

SEQ ID NO: 47164 - DNA, 34 bp, synthetic construct; identical to SEQ ID NO: 724
  misc_feature 1..34: note = Probe
  source 1..34: mol_type = other DNA

SEQ ID NO: 47165 - DNA, 17 bp, synthetic construct
  misc_feature 1..17: note = Probe
  source 1..17: mol_type = other DNA
cgccgtgatcgtatagt

SEQ ID NO: 47166 - DNA, 18 bp, synthetic construct
  misc_feature 1..18: note = Probe
  source 1..18: mol_type = other DNA
cgccgtgatcgtatagtg

SEQ ID NO: 47167 - DNA, 19 bp, synthetic construct
  misc_feature 1..19: note = Probe
  source 1..19: mol_type = other DNA
cgccgtgatcgtatagtgg

SEQ ID NO: 47168 - DNA, 20 bp, synthetic construct
  misc_feature 1..20: note = Probe
  source 1..20: mol_type = other DNA
cgccgtgatcgtatagtggt

SEQ ID NO: 47169 - DNA, 21 bp, synthetic construct
  misc_feature 1..21: note = Probe
  source 1..21: mol_type = other DNA
cgccgtgatcgtatagtggtt

SEQ ID NO: 47170 - DNA, 22 bp, synthetic construct
  misc_feature 1..22: note = Probe
  source 1..22: mol_type = other DNA
cgccgtgatcgtatagtggtta

SEQ ID NO: 47171 - DNA, 23 bp, synthetic construct
  misc_feature 1..23: note = Probe
  source 1..23: mol_type = other DNA
cgccgtgatcgtatagtggttag

SEQ ID NO: 47172 - DNA, 24 bp, synthetic construct
  misc_feature 1..24: note = Probe
  source 1..24: mol_type = other DNA
cgccgtgatcgtatagtggttagt

SEQ ID NO: 47173 - DNA, 27 bp, synthetic construct
  misc_feature 1..27: note = Probe
  source 1..27: mol_type = other DNA
cgccgtgatcgtatagtggttagtact

SEQ ID NO: 47174 - DNA, 31 bp, synthetic construct; identical to SEQ ID NO: 19077
  misc_feature 1..31: note = Probe
  source 1..31: mol_type = other DNA

SEQ ID NO: 47175 - DNA, 32 bp, synthetic construct; identical to SEQ ID NO: 4998
  misc_feature 1..32: note = Probe
  source 1..32: mol_type = other DNA

SEQ ID NO: 47176 - DNA, 33 bp, synthetic construct; identical to SEQ ID NO: 4999
  misc_feature 1..33: note = Probe
  source 1..33: mol_type = other DNA

SEQ ID NO: 47177 - DNA, 34 bp, synthetic construct; identical to SEQ ID NO: 5000
  misc_feature 1..34: note = Probe
  source 1..34: mol_type = other DNA

SEQ ID NO: 47178 - DNA, 35 bp, synthetic construct; identical to SEQ ID NO: 5001
  misc_feature 1..35: note = Probe
  source 1..35: mol_type = other DNA

SEQ ID NO: 47179 - DNA, 36 bp, synthetic construct; identical to SEQ ID NO: 5002
  misc_feature 1..36: note = Probe
  source 1..36: mol_type = other DNA

SEQ ID NO: 47180 - DNA, 37 bp, synthetic construct; identical to SEQ ID NO: 5003
  misc_feature 1..37: note = Probe
  source 1..37: mol_type = other DNA

SEQ ID NO: 47181 - DNA, 39 bp, synthetic construct; identical to SEQ ID NO: 19085
  misc_feature 1..39: note = Probe
  source 1..39: mol_type = other DNA

SEQ ID NO: 47182 - DNA, 40 bp, synthetic construct; identical to SEQ ID NO: 19086
  misc_feature 1..40: note = Probe
  source 1..40: mol_type = other DNA

SEQ ID NO: 47183 - DNA, 50 bp, synthetic construct; identical to SEQ ID NO: 30378
  misc_feature 1..50: note = Probe
  source 1..50: mol_type = other DNA

SEQ ID NO: 47184 - DNA, 23 bp, synthetic construct
  misc_feature 1..23: note = Probe
  source 1..23: mol_type = other DNA
cgcctgtcacgcgggagaccggg

SEQ ID NO: 47185 - DNA, 25 bp, synthetic construct
  misc_feature 1..25: note = Probe
  source 1..25: mol_type = other DNA
cgcctgtcacgcgggagaccggggt

SEQ ID NO: 47186 - DNA, 41 bp, synthetic construct; identical to SEQ ID NO: 13113
  misc_feature 1..41: note = Probe
  source 1..41: mol_type = other DNA

SEQ ID NO: 47187 - DNA, 44 bp, synthetic construct
  misc_feature 1..44: note = Probe
  source 1..44: mol_type = other DNA
cgcctgtcacgcgggagaccggggttcaattccccgacggggag

SEQ ID NO: 47188 - DNA, 50 bp, synthetic construct; identical to SEQ ID NO: 5005
  misc_feature 1..50: note = Probe
  source 1..50: mol_type = other DNA

SEQ ID NO: 47189 - DNA, 40 bp, synthetic construct; identical to SEQ ID NO: 13118
  misc_feature 1..40: note = Probe
  source 1..40: mol_type = other DNA

SEQ ID NO: 47190 - DNA, 42 bp, synthetic construct; identical to SEQ ID NO: 13120
  misc_feature 1..42: note = Probe
  source 1..42: mol_type = other DNA

SEQ ID NO: 47191 - DNA, 43 bp, synthetic construct; identical to SEQ ID NO: 13121
  misc_feature 1..43: note = Probe
  source 1..43: mol_type = other DNA

SEQ ID NO: 47192 - DNA, 45 bp, synthetic construct; identical to SEQ ID NO: 19102
  misc_feature 1..45: note = Probe
  source 1..45: mol_type = other DNA

SEQ ID NO: 47193 - DNA, 50 bp, synthetic construct; identical to SEQ ID NO: 19104
  misc_feature 1..50: note = Probe
  source 1..50: mol_type = other DNA

SEQ ID NO: 47194 - DNA, 45 bp, synthetic construct; identical to SEQ ID NO: 19106
  misc_feature 1..45: note = Probe
  source 1..45: mol_type = other DNA

SEQ ID NO: 47195 - DNA, 50 bp, synthetic construct; identical to SEQ ID NO: 19107
  misc_feature 1..50: note = Probe
  source 1..50: mol_type = other DNA

SEQ ID NO: 47196 - DNA, 48 bp, synthetic construct
  misc_feature 1..48: note = Probe
  source 1..48: mol_type = other DNA
cgcctgtcacgcgggagaccggggttcgattccccgacggggaggcac

SEQ ID NO: 47197 - DNA, 49 bp, synthetic construct; identical to SEQ ID NO: 19109
  misc_feature 1..49: note = Probe
  source 1..49: mol_type = other DNA

SEQ ID NO: 47198 - DNA, 50 bp, synthetic construct; identical to SEQ ID NO: 5007
  misc_feature 1..50: note = Probe
  source 1..50: mol_type = other DNA

SEQ ID NO: 47199 - DNA, 50 bp, synthetic construct; identical to SEQ ID NO: 5008
  misc_feature 1..50: note = Probe
  source 1..50: mol_type = other DNA

SEQ ID NO: 47200 - DNA, 50 bp, synthetic construct; identical to SEQ ID NO: 5009
  misc_feature 1..50: note = Probe
  source 1..50: mol_type = other DNA

SEQ ID NO: 47201 - DNA, 50 bp, synthetic construct; identical to SEQ ID NO: 19115
  misc_feature 1..50: note = Probe
  source 1..50: mol_type = other DNA

SEQ ID NO: 47202 - DNA, 22 bp, synthetic construct
  misc_feature 1..22: note = Probe
  source 1..22: mol_type = other DNA
cgccttaattttaataatcaac

SEQ ID NO: 47203 - DNA, 25 bp, synthetic construct
  misc_feature 1..25: note = Probe
  source 1..25: mol_type = other DNA
cgccttttttcccggcggcgggaga

SEQ ID NO: 47204 - DNA, 26 bp, synthetic construct
  misc_feature 1..26: note = Probe
  source 1..26: mol_type = other DNA
cgccttttttcccggcggcgggagaa

SEQ ID NO: 47205 - DNA, 27 bp, synthetic construct
  misc_feature 1..27: note = Probe
  source 1..27: mol_type = other DNA
cgccttttttcccggcggcgggagaag

SEQ ID NO: 47206 - DNA, 28 bp, synthetic construct
  misc_feature 1..28: note = Probe
  source 1..28: mol_type = other DNA
cgccttttttcccggcggcgggagaagt

SEQ ID NO: 47207 - DNA, 17 bp, synthetic construct
  misc_feature 1..17: note = Probe
  source 1..17: mol_type = other DNA
cgcgaaaggtccccggt

SEQ ID NO: 47208 - DNA, 38 bp, synthetic construct
  misc_feature 1..38: note = Probe
  source 1..38: mol_type = other DNA
cgcgaaaggtccccggttcgaaaccgggcggaaacacc

SEQ ID NO: 47209 - DNA, 39 bp, synthetic construct; identical to SEQ ID NO: 5017
  misc_feature 1..39: note = Probe
  source 1..39: mol_type = other DNA

SEQ ID NO: 47210 - DNA, 27 bp, synthetic construct
  misc_feature 1..27: note = Probe
  source 1..27: mol_type = other DNA
cgcgagttcaaatctcgctggggcctc

SEQ ID NO: 47211 - DNA, 28 bp, synthetic construct
  misc_feature 1..28: note = Probe
  source 1..28: mol_type = other DNA
cgcgagttcaaatctcgctggggcctcg

SEQ ID NO: 47212 - DNA, 29 bp, synthetic construct
  misc_feature 1..29: note = Probe
  source 1..29: mol_type = other DNA
cgcgagttcaaatctcgctggggcctcgg

SEQ ID NO: 47213 - DNA, 29 bp, synthetic construct
  misc_feature 1..29: note = Probe
  source 1..29: mol_type = other DNA
cgcgagttcaaatctcgctggggcctgct

SEQ ID NO: 47214 - DNA, 27 bp, synthetic construct
  misc_feature 1..27: note = Probe
  source 1..27: mol_type = other DNA
cgcgagttcaattctcgctggggcctg

SEQ ID NO: 47215 - DNA, 29 bp, synthetic construct
  misc_feature 1..29: note = Probe
  source 1..29: mol_type = other DNA
cgcgagttcaattctcgctggggcctgtg

SEQ ID NO: 47216 - DNA, 27 bp, synthetic construct
  misc_feature 1..27: note = Probe
  source 1..27: mol_type = other DNA
cgcgagttcgatcctcgctggggcctc

SEQ ID NO: 47217 - DNA, 26 bp, synthetic construct
  misc_feature 1..26: note = Probe
  source 1..26: mol_type = other DNA
cgcgcaggttcgaatcctgctcacag

SEQ ID NO: 47218 - DNA, 31 bp, synthetic construct; identical to SEQ ID NO: 19132
  misc_feature 1..31: note = Probe
  source 1..31: mol_type = other DNA

SEQ ID NO: 47219 - DNA, 32 bp, synthetic construct; identical to SEQ ID NO: 5019
  misc_feature 1..32: note = Probe
  source 1..32: mol_type = other DNA

SEQ ID NO: 47220 - DNA, 32 bp, synthetic construct; identical to SEQ ID NO: 5020
  misc_feature 1..32: note = Probe
  source 1..32: mol_type = other DNA

SEQ ID NO: 47221 - DNA, 32 bp, synthetic construct; identical to SEQ ID NO: 5021
  misc_feature 1..32: note = Probe
  source 1..32: mol_type = other DNA

SEQ ID NO: 47222 - DNA, 34 bp, synthetic construct; identical to SEQ ID NO: 5022
  misc_feature 1..34: note = Probe
  source 1..34: mol_type = other DNA

SEQ ID NO: 47223 - DNA, 18 bp, synthetic construct
  misc_feature 1..18: note = Probe
  source 1..18: mol_type = other DNA
cgcgggagaccggggttc

SEQ ID NO: 47224 - DNA, 30 bp, synthetic construct; identical to SEQ ID NO: 13129
  misc_feature 1..30: note = Probe
  source 1..30: mol_type = other DNA

SEQ ID NO: 47225 - DNA, 33 bp, synthetic construct; identical to SEQ ID NO: 13132
  misc_feature 1..33: note = Probe
  source 1..33: mol_type = other DNA

SEQ ID NO: 47226 - DNA, 36 bp, synthetic construct; identical to SEQ ID NO: 5025
  misc_feature 1..36: note = Probe
  source 1..36: mol_type = other DNA

SEQ ID NO: 47227 - DNA, 38 bp, synthetic construct; identical to SEQ ID NO: 5026
  misc_feature 1..38: note = Probe
  source 1..38: mol_type = other DNA

SEQ ID NO: 47228 - DNA, 29 bp, synthetic construct
  misc_feature 1..29: note = Probe
  source 1..29: mol_type = other DNA
cgcgggagaccggggttcgattccccgac

SEQ ID NO: 47229 - DNA, 36 bp, synthetic construct; identical to SEQ ID NO: 5028
  misc_feature 1..36: note = Probe
  source 1..36: mol_type = other DNA

SEQ ID NO: 47230 - DNA, 38 bp, synthetic construct; identical to SEQ ID NO: 5030
  misc_feature 1..38: note = Probe
  source 1..38: mol_type = other DNA

SEQ ID NO: 47231 - DNA, 37 bp, synthetic construct; identical to SEQ ID NO: 5031
  misc_feature 1..37: note = Probe
  source 1..37: mol_type = other DNA

SEQ ID NO: 47232 - DNA, 38 bp, synthetic construct; identical to SEQ ID NO: 5032
  misc_feature 1..38: note = Probe
  source 1..38: mol_type = other DNA

SEQ ID NO: 47233 - DNA, 38 bp, synthetic construct; identical to SEQ ID NO: 5033
  misc_feature 1..38: note = Probe
  source 1..38: mol_type = other DNA

SEQ ID NO: 47234 - DNA, 36 bp, synthetic construct; identical to SEQ ID NO: 5034
  misc_feature 1..36: note = Probe
  source 1..36: mol_type = other DNA

SEQ ID NO: 47235 - DNA, 37 bp, synthetic construct; identical to SEQ ID NO: 5035
  misc_feature 1..37: note = Probe
  source 1..37: mol_type = other DNA

SEQ ID NO: 47236 - DNA, 37 bp, synthetic construct; identical to SEQ ID NO: 5036
  misc_feature 1..37: note = Probe
  source 1..37: mol_type = other DNA

SEQ ID NO: 47237 - DNA, 38 bp, synthetic construct; identical to SEQ ID NO: 5037
  misc_feature 1..38: note = Probe
  source 1..38: mol_type = other DNA

SEQ ID NO: 47238 - DNA, 38 bp, synthetic construct; identical to SEQ ID NO: 5039
  misc_feature 1..38: note = Probe
  source 1..38: mol_type = other DNA

SEQ ID NO: 47239 - DNA, 16 bp, synthetic construct
  misc_feature 1..16: note = Probe
  source 1..16: mol_type = other DNA
cgcgggaggcccgggt

SEQ ID NO: 47240 - DNA, 35 bp, synthetic construct; identical to SEQ ID NO: 13149
  misc_feature 1..35: note = Probe
  source 1..35: mol_type = other DNA

SEQ ID NO: 47241 - DNA, 38 bp, synthetic construct; identical to SEQ ID NO: 19176
  misc_feature 1..38: note = Probe
  source 1..38: mol_type = other DNA

SEQ ID NO: 47242 - DNA, 38 bp, synthetic construct; identical to SEQ ID NO: 19179
  misc_feature 1..38: note = Probe
  source 1..38: mol_type = other DNA

SEQ ID NO: 47243 - DNA, 38 bp, synthetic construct; identical to SEQ ID NO: 5043
  misc_feature 1..38: note = Probe
  source 1..38: mol_type = other DNA

SEQ ID NO: 47244 - DNA, 26 bp, synthetic construct
  misc_feature 1..26: note = Probe
  source 1..26: mol_type = other DNA
cgcgggttcgatccccgtacgggcca

SEQ ID NO: 47245 - DNA, 27 bp, synthetic construct
  misc_feature 1..27: note = Probe
  source 1..27: mol_type = other DNA
cgcgggttcgatccccgtacgggccac

SEQ ID NO: 47246 - DNA, 28 bp, synthetic construct
  misc_feature 1..28: note = Probe
  source 1..28: mol_type = other DNA
cgcgggttcgatccccgtacgggccaca

SEQ ID NO: 47247 - DNA, 28 bp, synthetic construct
  misc_feature 1..28: note = Probe
  source 1..28: mol_type = other DNA
cgcgggttcgatccccgtacgggccacg

SEQ ID NO: 47248 - DNA, 29 bp, synthetic construct
  misc_feature 1..29: note = Probe
  source 1..29: mol_type = other DNA
cgcgggttcgatccccgtacgggccacga

SEQ ID NO: 47249 - DNA, 28 bp, synthetic construct
  misc_feature 1..28: note = Probe
  source 1..28: mol_type = other DNA
cgcgggttcgatccccgtacgggccact

SEQ ID NO: 47250 - DNA, 29 bp, synthetic construct
  misc_feature 1..29: note = Probe
  source 1..29: mol_type = other DNA
cgcgggttcgatccccgtacgggccactg

SEQ ID NO: 47251 - DNA, 28 bp, synthetic construct
  misc_feature 1..28: note = Probe
  source 1..28: mol_type = other DNA
cgcgggttcgatccccgtacgggccagg

SEQ ID NO: 47252 - DNA, 29 bp, synthetic construct
  misc_feature 1..29: note = Probe
  source 1..29: mol_type = other DNA
cgcgggttcgatccccgtacgggccaggc

SEQ ID NO: 47253 - DNA, 26 bp, synthetic construct
  misc_feature 1..26: note = Probe
  source 1..26: mol_type = other DNA
cgcgggttcgatccccgtactggcca

SEQ ID NO: 47254 - DNA, 28 bp, synthetic construct
  misc_feature 1..28: note = Probe
  source 1..28: mol_type = other DNA
cgcgggttcgatccccgtactggccacg

SEQ ID NO: 47255 - DNA, 29 bp, synthetic construct
  misc_feature 1..29: note = Probe
  source 1..29: mol_type = other DNA
cgcgggttcgatccccgtactggccacgt

SEQ ID NO: 47256 - DNA, 26 bp, synthetic construct
  misc_feature 1..26: note = Probe
  source 1..26: mol_type = other DNA
cgcgtgggttcgaatcccatcctcgt

SEQ ID NO: 47257 - DNA, 27 bp, synthetic construct
  misc_feature 1..27: note = Probe
  source 1..27: mol_type = other DNA
cgcgtgggttcgaatcccatcctcgtc

SEQ ID NO: 47258 - DNA, 28 bp, synthetic construct
  misc_feature 1..28: note = Probe
  source 1..28: mol_type = other DNA
cgcgtgggttcgaatcccatcctcgtcg

SEQ ID NO: 47259 - DNA, 42 bp, synthetic construct; identical to SEQ ID NO: 19192
  misc_feature 1..42: note = Probe
  source 1..42: mol_type = other DNA

SEQ ID NO: 47260 - DNA, 46 bp, synthetic construct; identical to SEQ ID NO: 19193
  misc_feature 1..46: note = Probe
  source 1..46: mol_type = other DNA

SEQ ID NO: 47261 - DNA, 46 bp, synthetic construct; identical to SEQ ID NO: 19194
  misc_feature 1..46: note = Probe
  source 1..46: mol_type = other DNA

SEQ ID NO: 47262 - DNA, 27 bp, synthetic construct
  misc_feature 1..27: note = Probe
  source 1..27: mol_type = other DNA
cgctggttcgaatccggctcgaaggac

SEQ ID NO: 47263 - DNA, 28 bp, synthetic construct
  misc_feature 1..28: note = Probe
  source 1..28: mol_type = other DNA
cgctggttcgaatccggctcgaaggacg

SEQ ID NO: 47264 - DNA, 29 bp, synthetic construct
  misc_feature 1..29: note = Probe
  source 1..29: mol_type = other DNA
cgctggttcgaatccggctcgaaggacga

SEQ ID NO: 47265 - DNA, 24 bp, synthetic construct
  misc_feature 1..24: note = Probe
  source 1..24: mol_type = other DNA
cgctggttcgattccggctcgaag

SEQ ID NO: 47266 - DNA, 29 bp, synthetic construct
  misc_feature 1..29: note = Probe
  source 1..29: mol_type = other DNA
cgctggttcgattccggctcgaaggaagt

SEQ ID NO: 47267 - DNA, 28 bp, synthetic construct
  misc_feature 1..28: note = Probe
  source 1..28: mol_type = other DNA
cgctggttcgattccggctcgaaggact

SEQ ID NO: 47268 - DNA, 29 bp, synthetic construct
  misc_feature 1..29: note = Probe
  source 1..29: mol_type = other DNA
cgctggttcgattccggctcgaaggactt

SEQ ID NO: 47269 - DNA, 29 bp, synthetic construct
  misc_feature 1..29: note = Probe
  source 1..29: mol_type = other DNA
cgctggttcgattccggctcgaaggagac

SEQ ID NO: 47270 - DNA, 29 bp, synthetic construct
  misc_feature 1..29: note = Probe
  source 1..29: mol_type = other DNA
cgctggttcgattccggctcgaaggagct

SEQ ID NO: 47271 - DNA, 49 bp, synthetic construct; identical to SEQ ID NO: 19203
  misc_feature 1..49: note = Probe
  source 1..49: mol_type = other DNA

SEQ ID NO: 47272 - DNA, 22 bp, synthetic construct
  misc_feature 1..22: note = Probe
  source 1..22: mol_type = other DNA
cggaagcgtgctgggcccataa

SEQ ID NO: 47273 - DNA, 32 bp, synthetic construct; identical to SEQ ID NO: 745
  misc_feature 1..32: note = Probe
  source 1..32: mol_type = other DNA

SEQ ID NO: 47274 - DNA, 35 bp, synthetic construct; identical to SEQ ID NO: 748
  misc_feature 1..35: note = Probe
  source 1..35: mol_type = other DNA

SEQ ID NO: 47275 - DNA, 39 bp, synthetic construct; identical to SEQ ID NO: 752
  misc_feature 1..39: note = Probe
  source 1..39: mol_type = other DNA

SEQ ID NO: 47276 - DNA, 40 bp, synthetic construct; identical to SEQ ID NO: 5055
  misc_feature 1..40: note = Probe
  source 1..40: mol_type = other DNA

SEQ ID NO: 47277 - DNA, 50 bp, synthetic construct; identical to SEQ ID NO: 19210
  misc_feature 1..50: note = Probe
  source 1..50: mol_type = other DNA

SEQ ID NO: 47278 - DNA, 50 bp, synthetic construct
  misc_feature 1..50: note = Probe
  source 1..50: mol_type = other DNA
cggagaattttggattctcagggatgggttcgattctcatagtcctagaa

SEQ ID NO: 47279 - DNA, 19 bp, synthetic construct
  misc_feature 1..19: note = Probe
  source 1..19: mol_type = other DNA
cggagatgaaaaccttttt

SEQ ID NO: 47280 - DNA, 23 bp, synthetic construct
  misc_feature 1..23: note = Probe
  source 1..23: mol_type = other DNA
cggagatgaaaacctttttccaa

SEQ ID NO: 47281 - DNA, 24 bp, synthetic construct
  misc_feature 1..24: note = Probe
  source 1..24: mol_type = other DNA
cggagatgaaaacctttttccaag

SEQ ID NO: 47282 - DNA, 27 bp, synthetic construct
  misc_feature 1..27: note = Probe
  source 1..27: mol_type = other DNA
cggagatgaaaacctttttccaaggac

SEQ ID NO: 47283 - DNA, 29 bp, synthetic construct
  misc_feature 1..29: note = Probe
  source 1..29: mol_type = other DNA
cggagatgaaaacctttttccaaggacaa

SEQ ID NO: 47284 - DNA, 30 bp, synthetic construct; identical to SEQ ID NO: 5060
  misc_feature 1..30: note = Probe
  source 1..30: mol_type = other DNA

SEQ ID NO: 47285 - DNA, 31 bp, synthetic construct; identical to SEQ ID NO: 5061
  misc_feature 1..31: note = Probe
  source 1..31: mol_type = other DNA

SEQ ID NO: 47286 - DNA, 32 bp, synthetic construct; identical to SEQ ID NO: 5062
  misc_feature 1..32: note = Probe
  source 1..32: mol_type = other DNA

SEQ ID NO: 47287 - DNA, 29 bp, synthetic construct
  misc_feature 1..29: note = Probe
  source 1..29: mol_type = other DNA
cggatagctcagtcggtagagcatcagac

SEQ ID NO: 47288 - DNA, 30 bp, synthetic construct; identical to SEQ ID NO: 762
  misc_feature 1..30: note = Probe
  source 1..30: mol_type = other DNA

SEQ ID NO: 47289 - DNA, 23 bp, synthetic construct
  misc_feature 1..23: note = Probe
  source 1..23: mol_type = other DNA
cggcccgggttcgactcccggtg

SEQ ID NO: 47290 - DNA, 25 bp, synthetic construct
  misc_feature 1..25: note = Probe
  source 1..25: mol_type = other DNA
cggcccgggttcgactcccggtgtg

SEQ ID NO: 47291 - DNA, 26 bp, synthetic construct
  misc_feature 1..26: note = Probe
  source 1..26: mol_type = other DNA
cggcccgggttcgactcccggtgtgg

SEQ ID NO: 47292 - DNA, 27 bp, synthetic construct
  misc_feature 1..27: note = Probe
  source 1..27: mol_type = other DNA
cggcccgggttcgactcccggtgtggg

SEQ ID NO: 47293 - DNA, 30 bp, synthetic construct; identical to SEQ ID NO: 766
  misc_feature 1..30: note = Probe
  source 1..30: mol_type = other DNA

SEQ ID NO: 47294 - DNA, 32 bp, synthetic construct; identical to SEQ ID NO: 5067
  misc_feature 1..32: note = Probe
  source 1..32: mol_type = other DNA

SEQ ID NO: 47295 - DNA, 23 bp, synthetic construct
  misc_feature 1..23: note = Probe
  source 1..23: mol_type = other DNA
cggcccgggttcgattcccggtc

SEQ ID NO: 47296 - DNA, 27 bp, synthetic construct
  misc_feature 1..27: note = Probe
  source 1..27: mol_type = other DNA
cggcccgggttcgattcccggtcaggg

SEQ ID NO: 47297 - DNA, 30 bp, synthetic construct; identical to SEQ ID NO: 5070
  misc_feature 1..30: note = Probe
  source 1..30: mol_type = other DNA

SEQ ID NO: 47298 - DNA, 30 bp, synthetic construct; identical to SEQ ID NO: 5071
  misc_feature 1..30: note = Probe
  source 1..30: mol_type = other DNA

SEQ ID NO: 47299 - DNA, 30 bp, synthetic construct; identical to SEQ ID NO: 5073
  misc_feature 1..30: note = Probe
  source 1..30: mol_type = other DNA

SEQ ID NO: 47300 - DNA, 32 bp, synthetic construct; identical to SEQ ID NO: 5074
  misc_feature 1..32: note = Probe
  source 1..32: mol_type = other DNA

SEQ ID NO: 47301 - DNA, 30 bp, synthetic construct; identical to SEQ ID NO: 771
  misc_feature 1..30: note = Probe
  source 1..30: mol_type = other DNA

SEQ ID NO: 47302 - DNA, 31 bp, synthetic construct; identical to SEQ ID NO: 772
  misc_feature 1..31: note = Probe
  source 1..31: mol_type = other DNA

SEQ ID NO: 47303 - DNA, 32 bp, synthetic construct; identical to SEQ ID NO: 773
  misc_feature 1..32: note = Probe
  source 1..32: mol_type = other DNA

SEQ ID NO: 47304 - DNA, 33 bp, synthetic construct; identical to SEQ ID NO: 774
  misc_feature 1..33: note = Probe
  source 1..33: mol_type = other DNA

SEQ ID NO: 47305 - DNA, 26 bp, synthetic construct
  misc_feature 1..26: note = Probe
  source 1..26: mol_type = other DNA
cggctagctcagtcggtagagcatgg

SEQ ID NO: 47306 - DNA, 27 bp, synthetic construct
  misc_feature 1..27: note = Probe
  source 1..27: mol_type = other DNA
cggctagctcagtcggtagagcatggg

SEQ ID NO: 47307 - DNA, 31 bp, synthetic construct; identical to SEQ ID NO: 779
  misc_feature 1..31: note = Probe
  source 1..31: mol_type = other DNA

SEQ ID NO: 47308 - DNA, 33 bp, synthetic construct; identical to SEQ ID NO: 781
  misc_feature 1..33: note = Probe
  source 1..33: mol_type = other DNA

SEQ ID NO: 47309 - DNA, 24 bp, synthetic construct
  misc_feature 1..24: note = Probe
  source 1..24: mol_type = other DNA
cggctgttaaccgaaaggttggtg

SEQ ID NO: 47310 - DNA, 26 bp, synthetic construct
  misc_feature 1..26: note = Probe
  source 1..26: mol_type = other DNA
cggctgttaaccgaaaggttggtggt

SEQ ID NO: 47311 - DNA, 46 bp, synthetic construct
  misc_feature 1..46: note = Probe
  source 1..46: mol_type = other DNA
cggctgttaaccgaaaggttggtggttcgagcccacccagggacgc

SEQ ID NO: 47312 - DNA, 50 bp, synthetic construct
  misc_feature 1..50: note = Probe
  source 1..50: mol_type = other DNA
cggctgttaaccgaaaggttggtggttcgagcccacccagggacgcctct

SEQ ID NO: 47313 - DNA, 50 bp, synthetic construct
  misc_feature 1..50: note = Probe
  source 1..50: mol_type = other DNA
cggctgttaaccgaaaggttggtggttcgagcccacccagggacgcgctc

SEQ ID NO: 47314 - DNA, 50 bp, synthetic construct; identical to SEQ ID NO: 30481
  misc_feature 1..50: note = Probe
  source 1..50: mol_type = other DNA

SEQ ID NO: 47315 - DNA, 50 bp, synthetic construct
  misc_feature 1..50: note = Probe
  source 1..50: mol_type = other DNA
cggctgttaaccgaaaggttggtggttcgagcccacccagggacgcttgt

SEQ ID NO: 47316 - DNA, 43 bp, synthetic construct
  misc_feature 1..43: note = Probe
  source 1..43: mol_type = other DNA
cggctgttaaccgaaaggttggtggttcgatcccacccaggga

SEQ ID NO: 47317 - DNA, 31 bp, synthetic construct; identical to SEQ ID NO: 13205
  misc_feature 1..31: note = Probe
  source 1..31: mol_type = other DNA

SEQ ID NO: 47318 - DNA, 34 bp, synthetic construct; identical to SEQ ID NO: 19251
  misc_feature 1..34: note = Probe
  source 1..34: mol_type = other DNA

SEQ ID NO: 47319 - DNA, 36 bp, synthetic construct; identical to SEQ ID NO: 5077
  misc_feature 1..36: note = Probe
  source 1..36: mol_type = other DNA

SEQ ID NO: 47320 - DNA, 28 bp, synthetic construct
  misc_feature 1..28: note = Probe
  source 1..28: mol_type = other DNA
cgggagaccggggttcgattccccgacg

SEQ ID NO: 47321 - DNA, 29 bp, synthetic construct
  misc_feature 1..29: note = Probe
  source 1..29: mol_type = other DNA
cgggagaccggggttcgattccccgacgg

SEQ ID NO: 47322 - DNA, 34 bp, synthetic construct; identical to SEQ ID NO: 5079
  misc_feature 1..34: note = Probe
  source 1..34: mol_type = other DNA

SEQ ID NO: 47323 - DNA, 35 bp, synthetic construct; identical to SEQ ID NO: 5081
  misc_feature 1..35: note = Probe
  source 1..35: mol_type = other DNA

SEQ ID NO: 47324 - DNA, 36 bp, synthetic construct; identical to SEQ ID NO: 19262
  misc_feature 1..36: note = Probe
  source 1..36: mol_type = other DNA

SEQ ID NO: 47325 - DNA, 34 bp, synthetic construct; identical to SEQ ID NO: 5082
  misc_feature 1..34: note = Probe
  source 1..34: mol_type = other DNA

SEQ ID NO: 47326 - DNA, 35 bp, synthetic construct; identical to SEQ ID NO: 5083
  misc_feature 1..35: note = Probe
  source 1..35: mol_type = other DNA

SEQ ID NO: 47327 - DNA, 36 bp, synthetic construct; identical to SEQ ID NO: 5084
  misc_feature 1..36: note = Probe
  source 1..36: mol_type = other DNA

SEQ ID NO: 47328 - DNA, 36 bp, synthetic construct; identical to SEQ ID NO: 5085
  misc_feature 1..36: note = Probe
  source 1..36: mol_type = other DNA

SEQ ID NO: 47329 - DNA, 33 bp, synthetic construct; identical to SEQ ID NO: 5086
  misc_feature 1..33: note = Probe
  source 1..33: mol_type = other DNA

SEQ ID NO: 47330 - DNA, 36 bp, synthetic construct; identical to SEQ ID NO: 19286
  misc_feature 1..36: note = Probe
  source 1..36: mol_type = other DNA

SEQ ID NO: 47331 - DNA, 36 bp, synthetic construct; identical to SEQ ID NO: 19288
  misc_feature 1..36: note = Probe
  source 1..36: mol_type = other DNA

SEQ ID NO: 47332 - DNA, 33 bp, synthetic construct; identical to SEQ ID NO: 5087
  misc_feature 1..33: note = Probe
  source 1..33: mol_type = other DNA

SEQ ID NO: 47333 - DNA, 24 bp, synthetic construct
  misc_feature 1..24: note = Probe
  source 1..24: mol_type = other DNA
cgggatcgatgcccgcatcctcca

SEQ ID NO: 47334 - DNA, 26 bp, synthetic construct
  misc_feature 1..26: note = Probe
  source 1..26: mol_type = other DNA
cgggctcacatcaccccataaacaaa

SEQ ID NO: 47335 - DNA, 27 bp, synthetic construct
  misc_feature 1..27: note = Probe
  source 1..27: mol_type = other DNA
cgggctcacatcaccccataaacaaat

SEQ ID NO: 47336 - DNA, 16 bp, synthetic construct
  misc_feature 1..16: note = Probe
  source 1..16: mol_type = other DNA
cggggcacaataattt

SEQ ID NO: 47337 - DNA, 33 bp, synthetic construct
  misc_feature 1..33: note = Probe
  source 1..33: mol_type = other DNA
cgggggtatagctcagtggtagagcatttgact

SEQ ID NO: 47338 - DNA, 26 bp, synthetic construct
  misc_feature 1..26: note = Probe
  source 1..26: mol_type = other DNA
cggggttcgattccccgacggggaga

SEQ ID NO: 47339 - DNA, 26 bp, synthetic construct
  misc_feature 1..26: note = Probe
  source 1..26: mol_type = other DNA
cggggttcgattccccgacggggagg

SEQ ID NO: 47340 - DNA, 28 bp, synthetic construct
  misc_feature 1..28: note = Probe
  source 1..28: mol_type = other DNA
cggggttcgattccccgacggggaggca

SEQ ID NO: 47341 - DNA, 27 bp, synthetic construct
  misc_feature 1..27: note = Probe
  source 1..27: mol_type = other DNA
cgggttcaaatcccggacgagccccct

SEQ ID NO: 47342 - DNA, 27 bp, synthetic construct
  misc_feature 1..27: note = Probe
  source 1..27: mol_type = other DNA
cgggttcaattcccggtcagggaacca

SEQ ID NO: 47343 - DNA, 27 bp, synthetic construct
  misc_feature 1..27: note = Probe
  source 1..27: mol_type = other DNA
cgggttcgactcccggtatgggaacaa

SEQ ID NO: 47344 - DNA, 27 bp, synthetic construct
  misc_feature 1..27: note = Probe
  source 1..27: mol_type = other DNA
cgggttcgactcccggtgtgggaacgc

SEQ ID NO: 47345 - DNA, 27 bp, synthetic construct
  misc_feature 1..27: note = Probe
  source 1..27: mol_type = other DNA
cgggttcgatccccagcatctccagtg

SEQ ID NO: 47346 - DNA, 27 bp, synthetic construct
  misc_feature 1..27: note = Probe
  source 1..27: mol_type = other DNA
cgggttcgatccccggcatctccattg

SEQ ID NO: 47347 - DNA, 27 bp, synthetic construct
  misc_feature 1..27: note = Probe
  source 1..27: mol_type = other DNA
cgggttcgatccccgtacgggccacga

SEQ ID NO: 47348 - DNA, 27 bp, synthetic construct
  misc_feature 1..27: note = Probe
  source 1..27: mol_type = other DNA
cgggttcgatccccgtacgggccactg

SEQ ID NO: 47349 - DNA, 27 bp, synthetic construct
  misc_feature 1..27: note = Probe
  source 1..27: mol_type = other DNA
cgggttcgattcccggccaatgcacga

SEQ ID NO: 47350 - DNA, 27 bp, synthetic construct
  misc_feature 1..27: note = Probe
  source 1..27: mol_type = other DNA
cgggttcgattcccggccaatgcagca

SEQ ID NO: 47351 - DNA, 27 bp, synthetic construct
  misc_feature 1..27: note = Probe
  source 1..27: mol_type = other DNA
cgggttcgattcccggtcatggaacca

SEQ ID NO: 47352 - DNA, 20 bp, synthetic construct
  misc_feature 1..20: note = Probe
  source 1..20: mol_type = other DNA
cggtaatcgcataaaactta

SEQ ID NO: 47353 - DNA, 25 bp, synthetic construct
  misc_feature 1..25: note = Probe
  source 1..25: mol_type = other DNA
cggtaatcgcataaaacttaaaact

SEQ ID NO: 47354 - DNA, 30 bp, synthetic construct; identical to SEQ ID NO: 19323
  misc_feature 1..30: note = Probe
  source 1..30: mol_type = other DNA

SEQ ID NO: 47355 - DNA, 33 bp, synthetic construct; identical to SEQ ID NO: 19324
  misc_feature 1..33: note = Probe
  source 1..33: mol_type = other DNA

SEQ ID NO: 47356 - DNA, 38 bp, synthetic construct
  misc_feature 1..38: note = Probe
  source 1..38: mol_type = other DNA
cggtaatcgcataaaacttaaaactttacagtcagagg

SEQ ID NO: 47357 - DNA, 41 bp, synthetic construct; identical to SEQ ID NO: 19327
  misc_feature 1..41: note = Probe
  source 1..41: mol_type = other DNA

SEQ ID NO: 47358 - DNA, 42 bp, synthetic construct; identical to SEQ ID NO: 19328
  misc_feature 1..42: note = Probe
  source 1..42: mol_type = other DNA

SEQ ID NO: 47359 - DNA, 17 bp, synthetic construct
  misc_feature 1..17: note = Probe
  source 1..17: mol_type = other DNA
cggtagagcatcagact

SEQ ID NO: 47360 - DNA, 20 bp, synthetic construct
  misc_feature 1..20: note = Probe
  source 1..20: mol_type = other DNA
cggtagagcatcagactttt

SEQ ID NO: 47361 - DNA, 49 bp, synthetic construct
  misc_feature 1..49: note = Probe
  source 1..49: mol_type = other DNA
cggtagagcatgagactcttaatctcagggtcgtgggttcgagccccac

SEQ ID NO: 47362 - DNA, 16 bp, synthetic construct
  misc_feature 1..16: note = Probe
  source 1..16: mol_type = other DNA
cggtagagcatgggac

SEQ ID NO: 47363 - DNA, 49 bp, synthetic construct
  misc_feature 1..49: note = Probe
  source 1..49: mol_type = other DNA
cggtagagcatgggactcttaatcccagggtcgtgggttcgagccccac

SEQ ID NO: 47364 - DNA, 50 bp, synthetic construct
  misc_feature 1..50: note = Probe
  source 1..50: mol_type = other DNA
cggttagctcagttggttagagcgtggtgctaataacgccaaggtcgcgg

SEQ ID NO: 47365 - DNA, 26 bp, synthetic construct
  misc_feature 1..26: note = Probe
  source 1..26: mol_type = other DNA
cggttcaaatccgggtgccccctcac

SEQ ID NO: 47366 - DNA, 26 bp, synthetic construct
  misc_feature 1..26: note = Probe
  source 1..26: mol_type = other DNA
cggttcaaatccgggtgccccctctg

SEQ ID NO: 47367 - DNA, 26 bp, synthetic construct
  misc_feature 1..26: note = Probe
  source 1..26: mol_type = other DNA
cggttcgaaaccgggcggaaacacct

SEQ ID NO: 47368 - DNA, 23 bp, synthetic construct
  misc_feature 1..23: note = Probe
  source 1..23: mol_type = other DNA
cggttcgaatccgagtcacggca

SEQ ID NO: 47369 - DNA, 26 bp, synthetic construct
  misc_feature 1..26: note = Probe
  source 1..26: mol_type = other DNA
cggttcgaatccgagtcacggcaggt

SEQ ID NO: 47370 - DNA, 26 bp, synthetic construct
  misc_feature 1..26: note = Probe
  source 1..26: mol_type = other DNA
cggttcgaatccgagtcacggcattg

SEQ ID NO: 47371 - DNA, 26 bp, synthetic construct
  misc_feature 1..26: note = Probe
  source 1..26: mol_type = other DNA
cggttcgatcccgggcggaaacaggt

SEQ ID NO: 47372 - DNA, 27 bp, synthetic construct
  misc_feature 1..27: note = Probe
  source 1..27: mol_type = other DNA
cgtagtgtagcggttatcacattcgcc

SEQ ID NO: 47373 - DNA, 23 bp, synthetic construct
  misc_feature 1..23: note = Probe
  source 1..23: mol_type = other DNA
cgtagtgtagtggttatcacgtt

SEQ ID NO: 47374 - DNA, 26 bp, synthetic construct
  misc_feature 1..26: note = Probe
  source 1..26: mol_type = other DNA
cgtagtgtagtggttatcacgttcgc

SEQ ID NO: 47375 - DNA, 27 bp, synthetic construct
  misc_feature 1..27: note = Probe
  source 1..27: mol_type = other DNA
cgtagtgtagtggttatcacgttcgcc

SEQ ID NO: 47376 - DNA, 50 bp, synthetic construct; identical to SEQ ID NO: 5113
  misc_feature 1..50: note = Probe
  source 1..50: mol_type = other DNA

SEQ ID NO: 47377 - DNA, 39 bp, synthetic construct; identical to SEQ ID NO: 19362
  misc_feature 1..39: note = Probe
  source 1..39: mol_type = other DNA

SEQ ID NO: 47378 - DNA, 27 bp, synthetic construct
  misc_feature 1..27: note = Probe
  source 1..27: mol_type = other DNA
cgtgagttcgagcctcacacggggcag

SEQ ID NO: 47379 - DNA, 28 bp, synthetic construct
  misc_feature 1..28: note = Probe
  source 1..28: mol_type = other DNA
cgtgagttcgagcctcacacggggcagt

SEQ ID NO: 47380 - DNA, 27 bp, synthetic construct
  misc_feature 1..27: note = Probe
  source 1..27: mol_type = other DNA
cgtgagttcgatcctcacacggggcac

SEQ ID NO: 47381 - DNA, 28 bp, synthetic construct
  misc_feature 1..28: note = Probe
  source 1..28: mol_type = other DNA
cgtgagttcgatcctcacacggggcaca

SEQ ID NO: 47382 - DNA, 29 bp, synthetic construct
  misc_feature 1..29: note = Probe
  source 1..29: mol_type = other DNA
cgtgagttcgatcctcacacggggcacaa

SEQ ID NO: 47383 - DNA, 34 bp, synthetic construct; identical to SEQ ID NO: 796
  misc_feature 1..34: note = Probe
  source 1..34: mol_type = other DNA

SEQ ID NO: 47384 - DNA, 28 bp, synthetic construct
  misc_feature 1..28: note = Probe
  source 1..28: mol_type = other DNA
cgtgctgggcccataacccagaggtcga

SEQ ID NO: 47385 - DNA, 50 bp, synthetic construct
  misc_feature 1..50: note = Probe
  source 1..50: mol_type = other DNA
cgtgctgggcccataacccagaggtcgatggatcgaaaccatcctctgct

SEQ ID NO: 47386 - DNA, 18 bp, synthetic construct
  misc_feature 1..18: note = Probe
  source 1..18: mol_type = other DNA
cgtggttgtagtccgtgc

SEQ ID NO: 47387 - DNA, 20 bp, synthetic construct
  misc_feature 1..20: note = Probe
  source 1..20: mol_type = other DNA
cgtggttgtagtccgtgcga

SEQ ID NO: 47388 - DNA, 24 bp, synthetic construct
  misc_feature 1..24: note = Probe
  source 1..24: mol_type = other DNA
cgtggttgtagtccgtgcgagaat

SEQ ID NO: 47389 - DNA, 25 bp, synthetic construct
  misc_feature 1..25: note = Probe
  source 1..25: mol_type = other DNA
cgtggttgtagtccgtgcgagaata

SEQ ID NO: 47390 - DNA, 27 bp, synthetic construct
  misc_feature 1..27: note = Probe
  source 1..27: mol_type = other DNA
cgtggttgtagtccgtgcgagaataat

SEQ ID NO: 47391 - DNA, 28 bp, synthetic construct
  misc_feature 1..28: note = Probe
  source 1..28: mol_type = other DNA
cgtggttgtagtccgtgcgagaataatg

SEQ ID NO: 47392 - DNA, 50 bp, synthetic construct; identical to SEQ ID NO: 5125
  misc_feature 1..50: note = Probe
  source 1..50: mol_type = other DNA

SEQ ID NO: 47393 - DNA, 29 bp, synthetic construct
  misc_feature 1..29: note = Probe
  source 1..29: mol_type = other DNA
ctaaacctagccccaaacccactccacct

SEQ ID NO: 47394 - DNA, 24 bp, synthetic construct
  misc_feature 1..24: note = Probe
  source 1..24: mol_type = other DNA
ctaaagacaggggttaggcctctt

SEQ ID NO: 47395 - DNA, 25 bp, synthetic construct
  misc_feature 1..25: note = Probe
  source 1..25: mol_type = other DNA
ctaaagacaggggttaggcctcttt

SEQ ID NO: 47396 - DNA, 26 bp, synthetic construct
  misc_feature 1..26: note = Probe
  source 1..26: mol_type = other DNA
ctaaagacaggggttaggcctctttt

SEQ ID NO: 47397 - DNA, 27 bp, synthetic construct
  misc_feature 1..27: note = Probe
  source 1..27: mol_type = other DNA
ctaaagacaggggttaggcctcttttt

SEQ ID NO: 47398 - DNA, 28 bp, synthetic construct
  misc_feature 1..28: note = Probe
  source 1..28: mol_type = other DNA
ctaaagacaggggttaggcctcttttta

SEQ ID NO: 47399 - DNA, 30 bp, synthetic construct; identical to SEQ ID NO: 5141
  misc_feature 1..30: note = Probe
  source 1..30: mol_type = other DNA

SEQ ID NO: 47400 - DNA, 31 bp, synthetic construct; identical to SEQ ID NO: 5142
  misc_feature 1..31: note = Probe
  source 1..31: mol_type = other DNA

SEQ ID NO: 47401 - DNA, 32 bp, synthetic construct; identical to SEQ ID NO: 5143
  misc_feature 1..32: note = Probe
  source 1..32: mol_type = other DNA

SEQ ID NO: 47402 - DNA, 33 bp, synthetic construct; identical to SEQ ID NO: 5144
  misc_feature 1..33: note = Probe
  source 1..33: mol_type = other DNA

SEQ ID NO: 47403 - DNA, 34 bp, synthetic construct; identical to SEQ ID NO: 5145
  misc_feature 1..34: note = Probe
  source 1..34: mol_type = other DNA

SEQ ID NO: 47404 - DNA, 35 bp, synthetic construct; identical to SEQ ID NO: 5146
  misc_feature 1..35: note = Probe
  source 1..35: mol_type = other DNA

SEQ ID NO: 47405 - DNA, 36 bp, synthetic construct; identical to SEQ ID NO: 5147
  misc_feature 1..36: note = Probe
  source 1..36: mol_type = other DNA

SEQ ID NO: 47406 - DNA, 37 bp, synthetic construct; identical to SEQ ID NO: 5148
  misc_feature 1..37: note = Probe
  source 1..37: mol_type = other DNA

SEQ ID NO: 47407 - DNA, 37 bp, synthetic construct; identical to SEQ ID NO: 19420
  misc_feature 1..37: note = Probe
  source 1..37: mol_type = other DNA

SEQ ID NO: 47408 - DNA, 50 bp, synthetic construct; identical to SEQ ID NO: 804
  misc_feature 1..50: note = Probe
  source 1..50: mol_type = other DNA

SEQ ID NO: 47409 - DNA, 22 bp, synthetic construct
  misc_feature 1..22: note = Probe
  source 1..22: mol_type = other DNA
ctaaatcctatatatcttaatg

SEQ ID NO: 47410 - DNA, 22 bp, synthetic construct
  misc_feature 1..22: note = Probe
  source 1..22: mol_type = other DNA
ctaacaacatggctttctcaac

SEQ ID NO: 47411 - DNA, 23 bp, synthetic construct
  misc_feature 1..23: note = Probe
  source 1..23: mol_type = other DNA
ctaacaacatggctttctcaact

SEQ ID NO: 47412 - DNA, 23 bp, synthetic construct
  misc_feature 1..23: note = Probe
  source 1..23: mol_type = other DNA
ctaacacgcgaaaggtccccggt

SEQ ID NO: 47413 - DNA, 21 bp, synthetic construct
  misc_feature 1..21: note = Probe
  source 1..21: mol_type = other DNA
ctaactcatgcccccatgtct

SEQ ID NO: 47414 - DNA, 25 bp, synthetic construct
  misc_feature 1..25: note = Probe
  source 1..25: mol_type = other DNA
ctaactcatgcccccatgtctaaca

SEQ ID NO: 47415 - DNA, 33 bp, synthetic construct; identical to SEQ ID NO: 5158
  misc_feature 1..33: note = Probe
  source 1..33: mol_type = other DNA

SEQ ID NO: 47416 - DNA, 37 bp, synthetic construct; identical to SEQ ID NO: 5162
  misc_feature 1..37: note = Probe
  source 1..37: mol_type = other DNA

SEQ ID NO: 47417 - DNA, 39 bp, synthetic construct; identical to SEQ ID NO: 5164
  misc_feature 1..39: note = Probe
  source 1..39: mol_type = other DNA

SEQ ID NO: 47418 - DNA, 41 bp, synthetic construct; identical to SEQ ID NO: 5166
  misc_feature 1..41: note = Probe
  source 1..41: mol_type = other DNA

SEQ ID NO: 47419 - DNA, 42 bp, synthetic construct; identical to SEQ ID NO: 5167
  misc_feature 1..42: note = Probe
  source 1..42: mol_type = other DNA

SEQ ID NO: 47420 - DNA, 42 bp, synthetic construct; identical to SEQ ID NO: 13231
  misc_feature 1..42: note = Probe
  source 1..42: mol_type = other DNA

SEQ ID NO: 47421 - DNA, 43 bp, synthetic construct
  misc_feature 1..43: note = Probe
  source 1..43: mol_type = other DNA
ctaacttagcattaaccttttaagttaaagattaagagaacca

SEQ ID NO: 47422 - DNA, 50 bp, synthetic construct; identical to SEQ ID NO: 5168
  misc_feature 1..50: note = Probe
  source 1..50: mol_type = other DNA

SEQ ID NO: 47423 - DNA, 42 bp, synthetic construct
  misc_feature 1..42: note = Probe
  source 1..42: mol_type = other DNA
ctaagccagggattgtgggttcgagtcccacccggggtaaag

SEQ ID NO: 47424 - DNA, 42 bp, synthetic construct; identical to SEQ ID NO: 39561
  misc_feature 1..42: note = Probe
  source 1..42: mol_type = other DNA

SEQ ID NO: 47425 - DNA, 42 bp, synthetic construct; identical to SEQ ID NO: 30715
  misc_feature 1..42: note = Probe
  source 1..42: mol_type = other DNA

SEQ ID NO: 47426 - DNA, 18 bp, synthetic construct
  misc_feature 1..18: note = Probe
  source 1..18: mol_type = other DNA
ctaagtgtttgtgggttt

SEQ ID NO: 47427 - DNA, 36 bp, synthetic construct; identical to SEQ ID NO: 19446
  misc_feature 1..36: note = Probe
  source 1..36: mol_type = other DNA

SEQ ID NO: 47428 - DNA, 37 bp, synthetic construct; identical to SEQ ID NO: 5172
  misc_feature 1..37: note = Probe
  source 1..37: mol_type = other DNA

SEQ ID NO: 47429 - DNA, 38 bp, synthetic construct; identical to SEQ ID NO: 5173
  misc_feature 1..38: note = Probe
  source 1..38: mol_type = other DNA

SEQ ID NO: 47430 - DNA, 23 bp, synthetic construct
  misc_feature 1..23: note = Probe
  source 1..23: mol_type = other DNA
ctaataacgccaaggtcgcgggt

SEQ ID NO: 47431 - DNA, 45 bp, synthetic construct; identical to SEQ ID NO: 39577
  misc_feature 1..45: note = Probe
  source 1..45: mol_type = other DNA

SEQ ID NO: 47432 - DNA, 50 bp, synthetic construct; identical to SEQ ID NO: 39578
  misc_feature 1..50: note = Probe
  source 1..50: mol_type = other DNA

SEQ ID NO: 47433 - DNA, 50 bp, synthetic construct; identical to SEQ ID NO: 39584
  misc_feature 1..50: note = Probe
  source 1..50: mol_type = other DNA

SEQ ID NO: 47434 - DNA, 18 bp, synthetic construct
  misc_feature 1..18: note = Probe
  source 1..18: mol_type = other DNA
ctaatggataaggcactg

SEQ ID NO: 47435 - DNA, 34 bp, synthetic construct; identical to SEQ ID NO: 19454
  misc_feature 1..34: note = Probe
  source 1..34: mol_type = other DNA

SEQ ID NO: 47436 - DNA, 39 bp, synthetic construct; identical to SEQ ID NO: 5176
  misc_feature 1..39: note = Probe
  source 1..39: mol_type = other DNA

SEQ ID NO: 47437 - DNA, 41 bp, synthetic construct; identical to SEQ ID NO: 5177
  misc_feature 1..41: note = Probe
  source 1..41: mol_type = other DNA

SEQ ID NO: 47438 - DNA, 17 bp, synthetic construct
  misc_feature 1..17: note = Probe
  source 1..17: mol_type = other DNA
ctactataaccacccta

SEQ ID NO: 47439 - DNA, 23 bp, synthetic construct
  misc_feature 1..23: note = Probe
  source 1..23: mol_type = other DNA
ctagccccaaacccactccacct

SEQ ID NO: 47440 - DNA, 17 bp, synthetic construct
  misc_feature 1..17: note = Probe
  source 1..17: mol_type = other DNA
ctagcctttctattagc

SEQ ID NO: 47441 - DNA, 27 bp, synthetic construct
  misc_feature 1..27: note = Probe
  source 1..27: mol_type = other DNA
ctagctcagtcggtagagcatgggact

SEQ ID NO: 47442 - DNA, 20 bp, synthetic construct
  misc_feature 1..20: note = Probe
  source 1..20: mol_type = other DNA
ctagtggttaggattcggcg

SEQ ID NO: 47443 - DNA, 20 bp, synthetic construct
  misc_feature 1..20: note = Probe
  source 1..20: mol_type = other DNA
ctatagcaccccctctaccc

SEQ ID NO: 47444 - DNA, 23 bp, synthetic construct
  misc_feature 1..23: note = Probe
  source 1..23: mol_type = other DNA
ctatccattggtcttaggcccca

SEQ ID NO: 47445 - DNA, 50 bp, synthetic construct; identical to SEQ ID NO: 5191
  misc_feature 1..50: note = Probe
  source 1..50: mol_type = other DNA

SEQ ID NO: 47446 - DNA, 50 bp, synthetic construct; identical to SEQ ID NO: 5200
  misc_feature 1..50: note = Probe
  source 1..50: mol_type = other DNA

SEQ ID NO: 47447 - DNA, 19 bp, synthetic construct
  misc_feature 1..19: note = Probe
  source 1..19: mol_type = other DNA
ctatctccccttttatact

SEQ ID NO: 47448 - DNA, 20 bp, synthetic construct
  misc_feature 1..20: note = Probe
  source 1..20: mol_type = other DNA
ctatctccccttttatacta

SEQ ID NO: 47449 - DNA, 18 bp, synthetic construct
  misc_feature 1..18: note = Probe
  source 1..18: mol_type = other DNA
ctcaaagcaatacactga

SEQ ID NO: 47450 - DNA, 22 bp, synthetic construct
  misc_feature 1..22: note = Probe
  source 1..22: mol_type = other DNA
ctcacaagaactgctaactcat

SEQ ID NO: 47451 - DNA, 23 bp, synthetic construct
  misc_feature 1..23: note = Probe
  source 1..23: mol_type = other DNA
ctcacaagaactgctaactcatg

SEQ ID NO: 47452 - DNA, 49 bp, synthetic construct; identical to SEQ ID NO: 812
  misc_feature 1..49: note = Probe
  source 1..49: mol_type = other DNA

SEQ ID NO: 47453 - DNA, 23 bp, synthetic construct
  misc_feature 1..23: note = Probe
  source 1..23: mol_type = other DNA
ctcacacgcgaaaggtccccggt

SEQ ID NO: 47454 - DNA, 22 bp, synthetic construct
  misc_feature 1..22: note = Probe
  source 1..22: mol_type = other DNA
ctcacacggggcacaataattt

SEQ ID NO: 47455 - DNA, 16 bp, synthetic construct
  misc_feature 1..16: note = Probe
  source 1..16: mol_type = other DNA
ctcacatcaccccata

SEQ ID NO: 47456 - DNA, 17 bp, synthetic construct
  misc_feature 1..17: note = Probe
  source 1..17: mol_type = other DNA
ctcacatcaccccataa

SEQ ID NO: 47457 - DNA, 20 bp, synthetic construct
  misc_feature 1..20: note = Probe
  source 1..20: mol_type = other DNA
ctcacatcaccccataaaca

SEQ ID NO: 47458 - DNA, 22 bp, synthetic construct
  misc_feature 1..22: note = Probe
  source 1..22: mol_type = other DNA
ctcacatcaccccataaacaaa

SEQ ID NO: 47459 - DNA, 23 bp, synthetic construct
  misc_feature 1..23: note = Probe
  source 1..23: mol_type = other DNA
ctcacatcaccccataaacaaat

SEQ ID NO: 47460 - DNA, 42 bp, synthetic construct; identical to SEQ ID NO: 19506
  misc_feature 1..42: note = Probe
  source 1..42: mol_type = other DNA

SEQ ID NO: 47461 - DNA, 42 bp, synthetic construct; identical to SEQ ID NO: 19507
  misc_feature 1..42: note = Probe
  source 1..42: mol_type = other DNA

SEQ ID NO: 47462 - DNA, 42 bp, synthetic construct; identical to SEQ ID NO: 19508
  misc_feature 1..42: note = Probe
  source 1..42: mol_type = other DNA

SEQ ID NO: 47463 - DNA, 42 bp, synthetic construct; identical to SEQ ID NO: 19509
  misc_feature 1..42: note = Probe
  source 1..42: mol_type = other DNA

SEQ ID NO: 47464 - DNA, 21 bp, synthetic construct
  misc_feature 1..21: note = Probe
  source 1..21: mol_type = other DNA
ctcacctggagcatgttttct

SEQ ID NO: 47465 - DNA, 16 bp, synthetic construct
  misc_feature 1..16: note = Probe
  source 1..16: mol_type = other DNA
ctcagggatgggttcg

SEQ ID NO: 47466 - DNA, 17 bp, synthetic construct
  misc_feature 1..17: note = Probe
  source 1..17: mol_type = other DNA
ctcagggatgggttcga

SEQ ID NO: 47467 - DNA, 23 bp, synthetic construct
  misc_feature 1..23: note = Probe
  source 1..23: mol_type = other DNA
ctcagggatgggttcgattctca

SEQ ID NO: 47468 - DNA, 28 bp, synthetic construct
  misc_feature 1..28: note = Probe
  source 1..28: mol_type = other DNA
ctcagggatgggttcgattctcatagtc

SEQ ID NO: 47469 - DNA, 29 bp, synthetic construct
  misc_feature 1..29: note = Probe
  source 1..29: mol_type = other DNA
ctcagggatgggttcgattctcatagtcc

SEQ ID NO: 47470 - DNA, 32 bp, synthetic construct; identical to SEQ ID NO: 816
  misc_feature 1..32: note = Probe
  source 1..32: mol_type = other DNA

SEQ ID NO: 47471 - DNA, 33 bp, synthetic construct; identical to SEQ ID NO: 5218
  misc_feature 1..33: note = Probe
  source 1..33: mol_type = other DNA

SEQ ID NO: 47472 - DNA, 35 bp, synthetic construct; identical to SEQ ID NO: 5220
  misc_feature 1..35: note = Probe
  source 1..35: mol_type = other DNA

SEQ ID NO: 47473 - DNA, 18 bp, synthetic construct
  misc_feature 1..18: note = Probe
  source 1..18: mol_type = other DNA
ctcagtaagttgcaatac

SEQ ID NO: 47474 - DNA, 24 bp, synthetic construct
  misc_feature 1..24: note = Probe
  source 1..24: mol_type = other DNA
ctcagtaagttgcaatacttaatt

SEQ ID NO: 47475 - DNA, 26 bp, synthetic construct
  misc_feature 1..26: note = Probe
  source 1..26: mol_type = other DNA
ctcagtaagttgcaatacttaatttc

SEQ ID NO: 47476 - DNA, 27 bp, synthetic construct
  misc_feature 1..27: note = Probe
  source 1..27: mol_type = other DNA
ctcagtaagttgcaatacttaatttct

SEQ ID NO: 47477 - DNA, 28 bp, synthetic construct
  misc_feature 1..28: note = Probe
  source 1..28: mol_type = other DNA
ctcagtaagttgcaatacttaatttctg

SEQ ID NO: 47478 - DNA, 45 bp, synthetic construct; identical to SEQ ID NO: 39634
  misc_feature 1..45: note = Probe
  source 1..45: mol_type = other DNA

SEQ ID NO: 47479 - DNA, 48 bp, synthetic construct
  misc_feature 1..48: note = Probe
  source 1..48: mol_type = other DNA
ctcataatctgaaggtcctgagttcgaacctcagagggggcagctgcc

SEQ ID NO: 47480 - DNA, 45 bp, synthetic construct; identical to SEQ ID NO: 39638
  misc_feature 1..45: note = Probe
  source 1..45: mol_type = other DNA

SEQ ID NO: 47481 - DNA, 21 bp, synthetic construct
  misc_feature 1..21: note = Probe
  source 1..21: mol_type = other DNA
ctcatgcccccatgtctaaca

SEQ ID NO: 47482 - DNA, 29 bp, synthetic construct
  misc_feature 1..29: note = Probe
  source 1..29: mol_type = other DNA
ctcatgcccccatgtctaacaacatggct

SEQ ID NO: 47483 - DNA, 30 bp, synthetic construct; identical to SEQ ID NO: 5236
  misc_feature 1..30: note = Probe
  source 1..30: mol_type = other DNA

SEQ ID NO: 47484 - DNA, 31 bp, synthetic construct; identical to SEQ ID NO: 5237
  misc_feature 1..31: note = Probe
  source 1..31: mol_type = other DNA

SEQ ID NO: 47485 - DNA, 32 bp, synthetic construct; identical to SEQ ID NO: 5238
  misc_feature 1..32: note = Probe
  source 1..32: mol_type = other DNA

SEQ ID NO: 47486 - DNA, 33 bp, synthetic construct; identical to SEQ ID NO: 5239
  misc_feature 1..33: note = Probe
  source 1..33: mol_type = other DNA

SEQ ID NO: 47487 - DNA, 35 bp, synthetic construct; identical to SEQ ID NO: 5241
  misc_feature 1..35: note = Probe
  source 1..35: mol_type = other DNA

SEQ ID NO: 47488 - DNA, 36 bp, synthetic construct; identical to SEQ ID NO: 5242
  misc_feature 1..36: note = Probe
  source 1..36: mol_type = other DNA

SEQ ID NO: 47489 - DNA, 37 bp, synthetic construct; identical to SEQ ID NO: 5243
  misc_feature 1..37: note = Probe
  source 1..37: mol_type = other DNA

SEQ ID NO: 47490 - DNA, 38 bp, synthetic construct; identical to SEQ ID NO: 5244
  misc_feature 1..38: note = Probe
  source 1..38: mol_type = other DNA

SEQ ID NO: 47491 - DNA, 34 bp, synthetic construct; identical to SEQ ID NO: 5247
  misc_feature 1..34: note = Probe
  source 1..34: mol_type = other DNA

SEQ ID NO: 47492 - DNA, 24 bp, synthetic construct
  misc_feature 1..24: note = Probe
  source 1..24: mol_type = other DNA
ctcatttacataaatattatacta

SEQ ID NO: 47493 - DNA, 25 bp, synthetic construct
  misc_feature 1..25: note = Probe
  source 1..25: mol_type = other DNA
ctccagtcatttcgatggcgtgggt

SEQ ID NO: 47494 - DNA, 50 bp, synthetic construct; identical to SEQ ID NO: 5248
  misc_feature 1..50: note = Probe
  source 1..50: mol_type = other DNA

SEQ ID NO: 47495 - DNA, 44 bp, synthetic construct
  misc_feature 1..44: note = Probe
  source 1..44: mol_type = other DNA
ctccagtctcttcgggggcgtgggttcgaatcccaccgctgcca

SEQ ID NO: 47496 - DNA, 50 bp, synthetic construct
  misc_feature 1..50: note = Probe
  source 1..50: mol_type = other DNA
ctccagtctcttcgggggcgtgggttcgaatcccaccgctgccagggttg

SEQ ID NO: 47497 - DNA, 50 bp, synthetic construct; identical to SEQ ID NO: 5249
  misc_feature 1..50: note = Probe
  source 1..50: mol_type = other DNA

SEQ ID NO: 47498 - DNA, 16 bp, synthetic construct
  misc_feature 1..16: note = Probe
  source 1..16: mol_type = other DNA
ctcccgccttttttcc

SEQ ID NO: 47499 - DNA, 17 bp, synthetic construct
  misc_feature 1..17: note = Probe
  source 1..17: mol_type = other DNA
ctcccgccttttttccc

SEQ ID NO: 47500 - DNA, 18 bp, synthetic construct
  misc_feature 1..18: note = Probe
  source 1..18: mol_type = other DNA
ctcccgccttttttcccg

SEQ ID NO: 47501 - DNA, 19 bp, synthetic construct
  misc_feature 1..19: note = Probe
  source 1..19: mol_type = other DNA
ctcccgccttttttcccgg

SEQ ID NO: 47502 - DNA, 20 bp, synthetic construct
  misc_feature 1..20: note = Probe
  source 1..20: mol_type = other DNA
ctcccgccttttttcccggc

SEQ ID NO: 47503 - DNA, 21 bp, synthetic construct
  misc_feature 1..21: note = Probe
  source 1..21: mol_type = other DNA
ctcccgccttttttcccggcg

SEQ ID NO: 47504 - DNA, 23 bp, synthetic construct
  misc_feature 1..23: note = Probe
  source 1..23: mol_type = other DNA
ctcccgccttttttcccggcggc

SEQ ID NO: 47505 - DNA, 24 bp, synthetic construct
  misc_feature 1..24: note = Probe
  source 1..24: mol_type = other DNA
ctcccgccttttttcccggcggcg

SEQ ID NO: 47506 - DNA, 25 bp, synthetic construct
  misc_feature 1..25: note = Probe
  source 1..25: mol_type = other DNA
ctcccgccttttttcccggcggcgg

SEQ ID NO: 47507 - DNA, 26 bp, synthetic construct
  misc_feature 1..26: note = Probe
  source 1..26: mol_type = other DNA
ctcccgccttttttcccggcggcggg

SEQ ID NO: 47508 - DNA, 27 bp, synthetic construct
  misc_feature 1..27: note = Probe
  source 1..27: mol_type = other DNA
ctcccgccttttttcccggcggcggga

SEQ ID NO: 47509 - DNA, 28 bp, synthetic construct
  misc_feature 1..28: note = Probe
  source 1..28: mol_type = other DNA
ctcccgccttttttcccggcggcgggag

SEQ ID NO: 47510 - DNA, 29 bp, synthetic construct
  misc_feature 1..29: note = Probe
  source 1..29: mol_type = other DNA
ctcccgccttttttcccggcggcgggaga

SEQ ID NO: 47511 - DNA, 30 bp, synthetic construct; identical to SEQ ID NO: 5265
  misc_feature 1..30: note = Probe
  source 1..30: mol_type = other DNA

SEQ ID NO: 47512 - DNA, 18 bp, synthetic construct
  misc_feature 1..18: note = Probe
  source 1..18: mol_type = other DNA
ctcccggtatgggaacaa

SEQ ID NO: 47513 - DNA, 17 bp, synthetic construct
  misc_feature 1..17: note = Probe
  source 1..17: mol_type = other DNA
ctcccggtgtgggaacg

SEQ ID NO: 47514 - DNA, 18 bp, synthetic construct
  misc_feature 1..18: note = Probe
  source 1..18: mol_type = other DNA
ctcccggtgtgggaacgc

SEQ ID NO: 47515 - DNA, 32 bp, synthetic construct; identical to SEQ ID NO: 39662
  misc_feature 1..32: note = Probe
  source 1..32: mol_type = other DNA

SEQ ID NO: 47516 - DNA, 34 bp, synthetic construct; identical to SEQ ID NO: 5267
  misc_feature 1..34: note = Probe
  source 1..34: mol_type = other DNA

SEQ ID NO: 47517 - DNA, 21 bp, synthetic construct
  misc_feature 1..21: note = Probe
  source 1..21: mol_type = other DNA
ctcctcaaagcaatacactga

SEQ ID NO: 47518 - DNA, 33 bp, synthetic construct
  misc_feature 1..33: note = Probe
  source 1..33: mol_type = other DNA
ctcctcgttagtatagtggtgagtatccccgcc

SEQ ID NO: 47519 - DNA, 37 bp, synthetic construct; identical to SEQ ID NO: 5270
  misc_feature 1..37: note = Probe
  source 1..37: mol_type = other DNA

SEQ ID NO: 47520 - DNA, 33 bp, synthetic construct; identical to SEQ ID NO: 819
  misc_feature 1..33: note = Probe
  source 1..33: mol_type = other DNA

SEQ ID NO: 47521 - DNA, 44 bp, synthetic construct; identical to SEQ ID NO: 19591
  misc_feature 1..44: note = Probe
  source 1..44: mol_type = other DNA

SEQ ID NO: 47522 - DNA, 50 bp, synthetic construct; identical to SEQ ID NO: 5278
  misc_feature 1..50: note = Probe
  source 1..50: mol_type = other DNA

SEQ ID NO: 47523 - DNA, 41 bp, synthetic construct; identical to SEQ ID NO: 19600
  misc_feature 1..41: note = Probe
  source 1..41: mol_type = other DNA

SEQ ID NO: 47524 - DNA, 42 bp, synthetic construct; identical to SEQ ID NO: 5280
  misc_feature 1..42: note = Probe
  source 1..42: mol_type = other DNA

SEQ ID NO: 47525 - DNA, 43 bp, synthetic construct; identical to SEQ ID NO: 5281
  misc_feature 1..43: note = Probe
  source 1..43: mol_type = other DNA

SEQ ID NO: 47526 - DNA, 44 bp, synthetic construct; identical to SEQ ID NO: 5282
  misc_feature 1..44: note = Probe
  source 1..44: mol_type = other DNA

SEQ ID NO: 47527 - DNA, 37 bp, synthetic construct; identical to SEQ ID NO: 5284
  misc_feature 1..37: note = Probe
  source 1..37: mol_type = other DNA

SEQ ID NO: 47528 - DNA, 34 bp, synthetic construct
  misc_feature 1..34: note = Probe
  source 1..34: mol_type = other DNA
ctgaaggtcgtgagttcgagcctcacacggggca

SEQ ID NO: 47529 - DNA, 31 bp, synthetic construct; identical to SEQ ID NO: 19609
  misc_feature 1..31: note = Probe
  source 1..31: mol_type = other DNA

SEQ ID NO: 47530 - DNA, 33 bp, synthetic construct
  misc_feature 1..33: note = Probe
  source 1..33: mol_type = other DNA
ctgaaggtcgtgagttcgatcctcacacggggc

SEQ ID NO: 47531 - DNA, 35 bp, synthetic construct
  misc_feature 1..35: note = Probe
  source 1..35: mol_type = other DNA
ctgaaggtcgtgagttcgatcctcacacggggcac

SEQ ID NO: 47532 - DNA, 37 bp, synthetic construct; identical to SEQ ID NO: 5287
  misc_feature 1..37: note = Probe
  source 1..37: mol_type = other DNA

SEQ ID NO: 47533 - DNA, 22 bp, synthetic construct
  misc_feature 1..22: note = Probe
  source 1..22: mol_type = other DNA
ctgaatccagcgatccgagttc

SEQ ID NO: 47534 - DNA, 39 bp, synthetic construct; identical to SEQ ID NO: 833
  misc_feature 1..39: note = Probe
  source 1..39: mol_type = other DNA

SEQ ID NO: 47535 - DNA, 42 bp, synthetic construct; identical to SEQ ID NO: 5291
  misc_feature 1..42: note = Probe
  source 1..42: mol_type = other DNA

SEQ ID NO: 47536 - DNA, 18 bp, synthetic construct
  misc_feature 1..18: note = Probe
  source 1..18: mol_type = other DNA
ctgacaacagaggcttac

SEQ ID NO: 47537 - DNA, 19 bp, synthetic construct
  misc_feature 1..19: note = Probe
  source 1..19: mol_type = other DNA
ctgacaacagaggcttacg

SEQ ID NO: 47538 - DNA, 23 bp, synthetic construct
  misc_feature 1..23: note = Probe
  source 1..23: mol_type = other DNA
ctgacaacagaggcttacgaccc

SEQ ID NO: 47539 - DNA, 34 bp, synthetic construct; identical to SEQ ID NO: 5298
  misc_feature 1..34: note = Probe
  source 1..34: mol_type = other DNA

SEQ ID NO: 47540 - DNA, 35 bp, synthetic construct; identical to SEQ ID NO: 5299
  misc_feature 1..35: note = Probe
  source 1..35: mol_type = other DNA

SEQ ID NO: 47541 - DNA, 36 bp, synthetic construct; identical to SEQ ID NO: 5300
  misc_feature 1..36: note = Probe
  source 1..36: mol_type = other DNA

SEQ ID NO: 47542 - DNA, 34 bp, synthetic construct; identical to SEQ ID NO: 19619
  misc_feature 1..34: note = Probe
  source 1..34: mol_type = other DNA

SEQ ID NO: 47543 - DNA, 35 bp, synthetic construct
  misc_feature 1..35: note = Probe
  source 1..35: mol_type = other DNA
ctgagggtccagggttcaagtccctgttcgggcgg

SEQ ID NO: 47544 - DNA, 35 bp, synthetic construct
  misc_feature 1..35: note = Probe
  source 1..35: mol_type = other DNA
ctgagggtccagggttcaagtccctgttcgggcgt

SEQ ID NO: 47545 - DNA, 50 bp, synthetic construct; identical to SEQ ID NO: 5306
  misc_feature 1..50: note = Probe
  source 1..50: mol_type = other DNA

SEQ ID NO: 47546 - DNA, 31 bp, synthetic construct; identical to SEQ ID NO: 19621
  misc_feature 1..31: note = Probe
  source 1..31: mol_type = other DNA

SEQ ID NO: 47547 - DNA, 32 bp, synthetic construct; identical to SEQ ID NO: 19622
  misc_feature 1..32: note = Probe
  source 1..32: mol_type = other DNA

SEQ ID NO: 47548 - DNA, 33 bp, synthetic construct; identical to SEQ ID NO: 5307
  misc_feature 1..33: note = Probe
  source 1..33: mol_type = other DNA

SEQ ID NO: 47549 - DNA, 22 bp, synthetic construct
  misc_feature 1..22: note = Probe
  source 1..22: mol_type = other DNA
ctgccacgcgggaggcccgggt

SEQ ID NO: 47550 - DNA, 23 bp, synthetic construct
  misc_feature 1..23: note = Probe
  source 1..23: mol_type = other DNA
ctgcgtgttcgaatcacgtcggg

SEQ ID NO: 47551 - DNA, 27 bp, synthetic construct
  misc_feature 1..27: note = Probe
  source 1..27: mol_type = other DNA
ctgcgtgttcgaatcacgtcggggtca

SEQ ID NO: 47552 - DNA, 28 bp, synthetic construct
  misc_feature 1..28: note = Probe
  source 1..28: mol_type = other DNA
ctgcgtgttcgaatcacgtcggggtcaa

SEQ ID NO: 47553 - DNA, 30 bp, synthetic construct; identical to SEQ ID NO: 5308
  misc_feature 1..30: note = Probe
  source 1..30: mol_type = other DNA

SEQ ID NO: 47554 - DNA, 23 bp, synthetic construct
  misc_feature 1..23: note = Probe
  source 1..23: mol_type = other DNA
ctgctaactcatgcccccatgtc

SEQ ID NO: 47555 - DNA, 24 bp, synthetic construct
  misc_feature 1..24: note = Probe
  source 1..24: mol_type = other DNA
ctgctaactcatgcccccatgtct

SEQ ID NO: 47556 - DNA, 28 bp, synthetic construct
  misc_feature 1..28: note = Probe
  source 1..28: mol_type = other DNA
ctgctaactcatgcccccatgtctaaca

SEQ ID NO: 47557 - DNA, 31 bp, synthetic construct; identical to SEQ ID NO: 5313
  misc_feature 1..31: note = Probe
  source 1..31: mol_type = other DNA

SEQ ID NO: 47558 - DNA, 36 bp, synthetic construct; identical to SEQ ID NO: 5314
  misc_feature 1..36: note = Probe
  source 1..36: mol_type = other DNA

SEQ ID NO: 47559 - DNA, 39 bp, synthetic construct; identical to SEQ ID NO: 5317
  misc_feature 1..39: note = Probe
  source 1..39: mol_type = other DNA

SEQ ID NO: 47560 - DNA, 40 bp, synthetic construct; identical to SEQ ID NO: 5318
  misc_feature 1..40: note = Probe
  source 1..40: mol_type = other DNA

SEQ ID NO: 47561 - DNA, 42 bp, synthetic construct; identical to SEQ ID NO: 5320
  misc_feature 1..42: note = Probe
  source 1..42: mol_type = other DNA

SEQ ID NO: 47562 - DNA, 44 bp, synthetic construct; identical to SEQ ID NO: 5322
  misc_feature 1..44: note = Probe
  source 1..44: mol_type = other DNA

SEQ ID NO: 47563 - DNA, 45 bp, synthetic construct; identical to SEQ ID NO: 5323
  misc_feature 1..45: note = Probe
  source 1..45: mol_type = other DNA

SEQ ID NO: 47564 - DNA, 50 bp, synthetic construct
  misc_feature 1..50: note = Probe
  source 1..50: mol_type = other DNA
ctgctttacacgcagaaggtcctgggttcgagccccagtggaaccacggc

SEQ ID NO: 47565 - DNA, 24 bp, synthetic construct
  misc_feature 1..24: note = Probe
  source 1..24: mol_type = other DNA
ctggaaagtgcacttggacgaacc

SEQ ID NO: 47566 - DNA, 33 bp, synthetic construct
  misc_feature 1..33: note = Probe
  source 1..33: mol_type = other DNA
ctggggattgtgggttcgagtcccatctgggtc

SEQ ID NO: 47567 - DNA, 32 bp, synthetic construct; identical to SEQ ID NO: 841
  misc_feature 1..32: note = Probe
  source 1..32: mol_type = other DNA

SEQ ID NO: 47568 - DNA, 33 bp, synthetic construct; identical to SEQ ID NO: 842
  misc_feature 1..33: note = Probe
  source 1..33: mol_type = other DNA

SEQ ID NO: 47569 - DNA, 48 bp, synthetic construct
  misc_feature 1..48: note = Probe
  source 1..48: mol_type = other DNA
ctggtgtagtggtatcatgcaagattcccattcttgcgacccgggttc

SEQ ID NO: 47570 - DNA, 26 bp, synthetic construct
  misc_feature 1..26: note = Probe
  source 1..26: mol_type = other DNA
ctggttcgaatccggctcgaaggacg

SEQ ID NO: 47571 - DNA, 24 bp, synthetic construct
  misc_feature 1..24: note = Probe
  source 1..24: mol_type = other DNA
ctggttcgatcccgggtttcggca

SEQ ID NO: 47572 - DNA, 24 bp, synthetic construct
  misc_feature 1..24: note = Probe
  source 1..24: mol_type = other DNA
ctggttcgattccggctcgaagga

SEQ ID NO: 47573 - DNA, 26 bp, synthetic construct
  misc_feature 1..26: note = Probe
  source 1..26: mol_type = other DNA
ctggttcgattccggctcgaaggact

SEQ ID NO: 47574 - DNA, 50 bp, synthetic construct; identical to SEQ ID NO: 844
  misc_feature 1..50: note = Probe
  source 1..50: mol_type = other DNA

SEQ ID NO: 47575 - DNA, 17 bp, synthetic construct
  misc_feature 1..17: note = Probe
  source 1..17: mol_type = other DNA
ctgtcacgcgggagacc

SEQ ID NO: 47576 - DNA, 20 bp, synthetic construct
  misc_feature 1..20: note = Probe
  source 1..20: mol_type = other DNA
ctgtcacgcgggagaccggg

SEQ ID NO: 47577 - DNA, 24 bp, synthetic construct
  misc_feature 1..24: note = Probe
  source 1..24: mol_type = other DNA
ctgtcacgcgggagaccggggttc

SEQ ID NO: 47578 - DNA, 39 bp, synthetic construct; identical to SEQ ID NO: 846
  misc_feature 1..39: note = Probe
  source 1..39: mol_type = other DNA

SEQ ID NO: 47579 - DNA, 40 bp, synthetic construct
  misc_feature 1..40: note = Probe
  source 1..40: mol_type = other DNA
ctgtcacgcgggagaccggggttcaattccccgacgggga

SEQ ID NO: 47580 - DNA, 41 bp, synthetic construct; identical to SEQ ID NO: 36674
  misc_feature 1..41: note = Probe
  source 1..41: mol_type = other DNA

SEQ ID NO: 47581 - DNA, 44 bp, synthetic construct; identical to SEQ ID NO: 5338
  misc_feature 1..44: note = Probe
  source 1..44: mol_type = other DNA

SEQ ID NO: 47582 - DNA, 37 bp, synthetic construct; identical to SEQ ID NO: 13293
  misc_feature 1..37: note = Probe
  source 1..37: mol_type = other DNA

SEQ ID NO: 47583 - DNA, 38 bp, synthetic construct; identical to SEQ ID NO: 13294
  misc_feature 1..38: note = Probe
  source 1..38: mol_type = other DNA

SEQ ID NO: 47584 - DNA, 42 bp, synthetic construct; identical to SEQ ID NO: 19677
  misc_feature 1..42: note = Probe
  source 1..42: mol_type = other DNA

SEQ ID NO: 47585 - DNA, 50 bp, synthetic construct; identical to SEQ ID NO: 39803
  misc_feature 1..50: note = Probe
  source 1..50: mol_type = other DNA

SEQ ID NO: 47586 - DNA, 44 bp, synthetic construct; identical to SEQ ID NO: 5339
  misc_feature 1..44: note = Probe
  source 1..44: mol_type = other DNA

SEQ ID NO: 47587 - DNA, 42 bp, synthetic construct; identical to SEQ ID NO: 19681
  misc_feature 1..42: note = Probe
  source 1..42: mol_type = other DNA

SEQ ID NO: 47588 - DNA, 44 bp, synthetic construct; identical to SEQ ID NO: 5340
  misc_feature 1..44: note = Probe
  source 1..44: mol_type = other DNA

SEQ ID NO: 47589 - DNA, 50 bp, synthetic construct; identical to SEQ ID NO: 5341
  misc_feature 1..50: note = Probe
  source 1..50: mol_type = other DNA

SEQ ID NO: 47590 - DNA, 50 bp, synthetic construct; identical to SEQ ID NO: 39824
  misc_feature 1..50: note = Probe
  source 1..50: mol_type = other DNA

SEQ ID NO: 47591 - DNA, 22 bp, synthetic construct
  misc_feature 1..22: note = Probe
  source 1..22: mol_type = other DNA
ctgtgctccggagttacctcgt

SEQ ID NO: 47592 - DNA, 23 bp, synthetic construct
  misc_feature 1..23: note = Probe
  source 1..23: mol_type = other DNA
ctgtgctccggagttacctcgtt

SEQ ID NO: 47593 - DNA, 24 bp, synthetic construct
  misc_feature 1..24: note = Probe
  source 1..24: mol_type = other DNA
ctgtgctccggagttacctcgttt

SEQ ID NO: 47594 - DNA, 25 bp, synthetic construct
  misc_feature 1..25: note = Probe
  source 1..25: mol_type = other DNA
ctgtgctccggagttacctcgtttt

SEQ ID NO: 47595 - DNA, 40 bp, synthetic construct
  misc_feature 1..40: note = Probe
  source 1..40: mol_type = other DNA
ctgttaaccgaaaggttggtggttcgagcccacccaggga

SEQ ID NO: 47596 - DNA, 42 bp, synthetic construct; identical to SEQ ID NO: 36692
  misc_feature 1..42: note = Probe
  source 1..42: mol_type = other DNA

SEQ ID NO: 47597 - DNA, 25 bp, synthetic construct
  misc_feature 1..25: note = Probe
  source 1..25: mol_type = other DNA
ctgttaactaagtgtttgtgggttt

SEQ ID NO: 47598 - DNA, 29 bp, synthetic construct
  misc_feature 1..29: note = Probe
  source 1..29: mol_type = other DNA
ctgttaactaagtgtttgtgggtttaagt

SEQ ID NO: 47599 - DNA, 43 bp, synthetic construct; identical to SEQ ID NO: 19694
  misc_feature 1..43: note = Probe
  source 1..43: mol_type = other DNA

SEQ ID NO: 47600 - DNA, 44 bp, synthetic construct; identical to SEQ ID NO: 5345
  misc_feature 1..44: note = Probe
  source 1..44: mol_type = other DNA

SEQ ID NO: 47601 - DNA, 45 bp, synthetic construct; identical to SEQ ID NO: 5346
  misc_feature 1..45: note = Probe
  source 1..45: mol_type = other DNA

SEQ ID NO: 47602 - DNA, 38 bp, synthetic construct; identical to SEQ ID NO: 5349
  misc_feature 1..38: note = Probe
  source 1..38: mol_type = other DNA

SEQ ID NO: 47603 - DNA, 39 bp, synthetic construct; identical to SEQ ID NO: 5350
  misc_feature 1..39: note = Probe
  source 1..39: mol_type = other DNA

SEQ ID NO: 47604 - DNA, 40 bp, synthetic construct; identical to SEQ ID NO: 5351
  misc_feature 1..40: note = Probe
  source 1..40: mol_type = other DNA

SEQ ID NO: 47605 - DNA, 41 bp, synthetic construct; identical to SEQ ID NO: 5352
  misc_feature 1..41: note = Probe
  source 1..41: mol_type = other DNA

SEQ ID NO: 47606 - DNA, 42 bp, synthetic construct; identical to SEQ ID NO: 5353
  misc_feature 1..42: note = Probe
  source 1..42: mol_type = other DNA

SEQ ID NO: 47607 - DNA, 45 bp, synthetic construct; identical to SEQ ID NO: 5355
  misc_feature 1..45: note = Probe
  source 1..45: mol_type = other DNA

SEQ ID NO: 47608 - DNA, 20 bp, synthetic construct
  misc_feature 1..20: note = Probe
  source 1..20: mol_type = other DNA
cttaaacccccttatttcta

SEQ ID NO: 47609 - DNA, 22 bp, synthetic construct
  misc_feature 1..22: note = Probe
  source 1..22: mol_type = other DNA
cttaaacccccttatttctagg

SEQ ID NO: 47610 - DNA, 16 bp, synthetic construct
  misc_feature 1..16: note = Probe
  source 1..16: mol_type = other DNA
cttaacacaaagcacc

SEQ ID NO: 47611 - DNA, 17 bp, synthetic construct
  misc_feature 1..17: note = Probe
  source 1..17: mol_type = other DNA
cttaacacaaagcaccc

SEQ ID NO: 47612 - DNA, 18 bp, synthetic construct
  misc_feature 1..18: note = Probe
  source 1..18: mol_type = other DNA
cttaacacaaagcaccca

SEQ ID NO: 47613 - DNA, 19 bp, synthetic construct
  misc_feature 1..19: note = Probe
  source 1..19: mol_type = other DNA
cttaacacaaagcacccaa

SEQ ID NO: 47614 - DNA, 21 bp, synthetic construct
  misc_feature 1..21: note = Probe
  source 1..21: mol_type = other DNA
cttaacacaaagcacccaact

SEQ ID NO: 47615 - DNA, 27 bp, synthetic construct
  misc_feature 1..27: note = Probe
  source 1..27: mol_type = other DNA
cttaacacaaagcacccaacttacact

SEQ ID NO: 47616 - DNA, 35 bp, synthetic construct
  misc_feature 1..35: note = Probe
  source 1..35: mol_type = other DNA
cttaacacaaagcacccaacttacacttaggagat

SEQ ID NO: 47617 - DNA, 50 bp, synthetic construct; identical to SEQ ID NO: 849
  misc_feature 1..50: note = Probe
  source 1..50: mol_type = other DNA

SEQ ID NO: 47618 - DNA, 21 bp, synthetic construct
  misc_feature 1..21: note = Probe
  source 1..21: mol_type = other DNA
cttaacttgaccgctctgagc

SEQ ID NO: 47619 - DNA, 22 bp, synthetic construct
  misc_feature 1..22: note = Probe
  source 1..22: mol_type = other DNA
cttaacttgaccgctctgagct

SEQ ID NO: 47620 - DNA, 20 bp, synthetic construct
  misc_feature 1..20: note = Probe
  source 1..20: mol_type = other DNA
cttacacttaggagatttca

SEQ ID NO: 47621 - DNA, 34 bp, synthetic construct; identical to SEQ ID NO: 5367
  misc_feature 1..34: note = Probe
  source 1..34: mol_type = other DNA

SEQ ID NO: 47622 - DNA, 35 bp, synthetic construct
  misc_feature 1..35: note = Probe
  source 1..35: mol_type = other DNA
cttacacttaggagatttcaacttaacttgaccgc

SEQ ID NO: 47623 - DNA, 36 bp, synthetic construct; identical to SEQ ID NO: 5368
  misc_feature 1..36: note = Probe
  source 1..36: mol_type = other DNA

SEQ ID NO: 47624 - DNA, 38 bp, synthetic construct; identical to SEQ ID NO: 19716
  misc_feature 1..38: note = Probe
  source 1..38: mol_type = other DNA

SEQ ID NO: 47625 - DNA, 41 bp, synthetic construct; identical to SEQ ID NO: 5370
  misc_feature 1..41: note = Probe
  source 1..41: mol_type = other DNA

SEQ ID NO: 47626 - DNA, 42 bp, synthetic construct; identical to SEQ ID NO: 5371
  misc_feature 1..42: note = Probe
  source 1..42: mol_type = other DNA

SEQ ID NO: 47627 - DNA, 43 bp, synthetic construct; identical to SEQ ID NO: 5372
  misc_feature 1..43: note = Probe
  source 1..43: mol_type = other DNA

SEQ ID NO: 47628 - DNA, 17 bp, synthetic construct
  misc_feature 1..17: note = Probe
  source 1..17: mol_type = other DNA
cttacctcctcaaagca

SEQ ID NO: 47629 - DNA, 25 bp, synthetic construct
  misc_feature 1..25: note = Probe
  source 1..25: mol_type = other DNA
cttacctcctcaaagcaatacactg

SEQ ID NO: 47630 - DNA, 29 bp, synthetic construct
  misc_feature 1..29: note = Probe
  source 1..29: mol_type = other DNA
cttagcattaaccttttaagttaaagatt

SEQ ID NO: 47631 - DNA, 36 bp, synthetic construct; identical to SEQ ID NO: 5376
  misc_feature 1..36: note = Probe
  source 1..36: mol_type = other DNA

SEQ ID NO: 47632 - DNA, 38 bp, synthetic construct; identical to SEQ ID NO: 19725
  misc_feature 1..38: note = Probe
  source 1..38: mol_type = other DNA

SEQ ID NO: 47633 - DNA, 39 bp, synthetic construct; identical to SEQ ID NO: 5377
  misc_feature 1..39: note = Probe
  source 1..39: mol_type = other DNA

SEQ ID NO: 47634 - DNA, 44 bp, synthetic construct
  misc_feature 1..44: note = Probe
  source 1..44: mol_type = other DNA
cttagcattaaccttttaagttaaagattaagagaaccaacacc

SEQ ID NO: 47635 - DNA, 50 bp, synthetic construct; identical to SEQ ID NO: 850
  misc_feature 1..50: note = Probe
  source 1..50: mol_type = other DNA

SEQ ID NO: 47636 - DNA, 50 bp, synthetic construct; identical to SEQ ID NO: 5381
  misc_feature 1..50: note = Probe
  source 1..50: mol_type = other DNA

SEQ ID NO: 47637 - DNA, 24 bp, synthetic construct
  misc_feature 1..24: note = Probe
  source 1..24: mol_type = other DNA
cttaggagatttcaacttaacttg

SEQ ID NO: 47638 - DNA, 25 bp, synthetic construct
  misc_feature 1..25: note = Probe
  source 1..25: mol_type = other DNA
cttaggagatttcaacttaacttga

SEQ ID NO: 47639 - DNA, 26 bp, synthetic construct
  misc_feature 1..26: note = Probe
  source 1..26: mol_type = other DNA
cttaggagatttcaacttaacttgac

SEQ ID NO: 47640 - DNA, 27 bp, synthetic construct
  misc_feature 1..27: note = Probe
  source 1..27: mol_type = other DNA
cttaggagatttcaacttaacttgacc

SEQ ID NO: 47641 - DNA, 28 bp, synthetic construct
  misc_feature 1..28: note = Probe
  source 1..28: mol_type = other DNA
cttaggagatttcaacttaacttgaccg

SEQ ID NO: 47642 - DNA, 29 bp, synthetic construct
  misc_feature 1..29: note = Probe
  source 1..29: mol_type = other DNA
cttaggagatttcaacttaacttgaccgc

SEQ ID NO: 47643 - DNA, 30 bp, synthetic construct; identical to SEQ ID NO: 5384
  misc_feature 1..30: note = Probe
  source 1..30: mol_type = other DNA

SEQ ID NO: 47644 - DNA, 31 bp, synthetic construct; identical to SEQ ID NO: 5385
  misc_feature 1..31: note = Probe
  source 1..31: mol_type = other DNA

SEQ ID NO: 47645 - DNA, 32 bp, synthetic construct; identical to SEQ ID NO: 5386
  misc_feature 1..32: note = Probe
  source 1..32: mol_type = other DNA

SEQ ID NO: 47646 - DNA, 34 bp, synthetic construct; identical to SEQ ID NO: 5388
  misc_feature 1..34: note = Probe
  source 1..34: mol_type = other DNA

SEQ ID NO: 47647 - DNA, 35 bp, synthetic construct; identical to SEQ ID NO: 5389
  misc_feature 1..35: note = Probe
  source 1..35: mol_type = other DNA

SEQ ID NO: 47648 - DNA, 36 bp, synthetic construct; identical to SEQ ID NO: 5390
  misc_feature 1..36: note = Probe
  source 1..36: mol_type = other DNA

SEQ ID NO: 47649 - DNA, 37 bp, synthetic construct; identical to SEQ ID NO: 5391
  misc_feature 1..37: note = Probe
  source 1..37: mol_type = other DNA

SEQ ID NO: 47650 - DNA, 35 bp, synthetic construct
  misc_feature 1..35: note = Probe
  source 1..35: mol_type = other DNA
cttaggccccaaaaattttggtgcaactccaaata

SEQ ID NO: 47651 - DNA, 44 bp, synthetic construct
  misc_feature 1..44: note = Probe
  source 1..44: mol_type = other DNA
cttaggccccaaaaattttggtgcaactccaaataaaagtaata

SEQ ID NO: 47652 - DNA, 33 bp, synthetic construct
  misc_feature 1..33: note = Probe
  source 1..33: mol_type = other DNA
cttaggtcgctggttcgaatccggctcgaagga

SEQ ID NO: 47653 - DNA, 33 bp, synthetic construct; identical to SEQ ID NO: 19740
  misc_feature 1..33: note = Probe
  source 1..33: mol_type = other DNA

SEQ ID NO: 47654 - DNA, 41 bp, synthetic construct; identical to SEQ ID NO: 19749
  misc_feature 1..41: note = Probe
  source 1..41: mol_type = other DNA

SEQ ID NO: 47655 - DNA, 42 bp, synthetic construct; identical to SEQ ID NO: 19750
  misc_feature 1..42: note = Probe
  source 1..42: mol_type = other DNA

SEQ ID NO: 47656 - DNA, 43 bp, synthetic construct; identical to SEQ ID NO: 5395
  misc_feature 1..43: note = Probe
  source 1..43: mol_type = other DNA

SEQ ID NO: 47657 - DNA, 50 bp, synthetic construct
  misc_feature 1..50: note = Probe
  source 1..50: mol_type = other DNA
cttccaattaactagttttgacaacattcaaaaaagagtaataaacttcg

SEQ ID NO: 47658 - DNA, 33 bp, synthetic construct; identical to SEQ ID NO: 19755
  misc_feature 1..33: note = Probe
  source 1..33: mol_type = other DNA

SEQ ID NO: 47659 - DNA, 40 bp, synthetic construct; identical to SEQ ID NO: 5396
  misc_feature 1..40: note = Probe
  source 1..40: mol_type = other DNA

SEQ ID NO: 47660 - DNA, 46 bp, synthetic construct; identical to SEQ ID NO: 5397
  misc_feature 1..46: note = Probe
  source 1..46: mol_type = other DNA

SEQ ID NO: 47661 - DNA, 17 bp, synthetic construct
  misc_feature 1..17: note = Probe
  source 1..17: mol_type = other DNA
ctttacagtcagaggtt

SEQ ID NO: 47662 - DNA, 18 bp, synthetic construct
  misc_feature 1..18: note = Probe
  source 1..18: mol_type = other DNA
ctttacagtcagaggttc

SEQ ID NO: 47663 - DNA, 29 bp, synthetic construct
  misc_feature 1..29: note = Probe
  source 1..29: mol_type = other DNA
ctttacagtcagaggttcaattcctcttc

SEQ ID NO: 47664 - DNA, 30 bp, synthetic construct; identical to SEQ ID NO: 19761
  misc_feature 1..30: note = Probe
  source 1..30: mol_type = other DNA

SEQ ID NO: 47665 - DNA, 37 bp, synthetic construct; identical to SEQ ID NO: 5399
  misc_feature 1..37: note = Probe
  source 1..37: mol_type = other DNA

SEQ ID NO: 47666 - DNA, 38 bp, synthetic construct; identical to SEQ ID NO: 5400
  misc_feature 1..38: note = Probe
  source 1..38: mol_type = other DNA

SEQ ID NO: 47667 - DNA, 33 bp, synthetic construct; identical to SEQ ID NO: 31135
  misc_feature 1..33: note = Probe
  source 1..33: mol_type = other DNA

SEQ ID NO: 47668 - DNA, 46 bp, synthetic construct; identical to SEQ ID NO: 5403
  misc_feature 1..46: note = Probe
  source 1..46: mol_type = other DNA

SEQ ID NO: 47669 - DNA, 50 bp, synthetic construct; identical to SEQ ID NO: 5404
  misc_feature 1..50: note = Probe
  source 1..50: mol_type = other DNA

SEQ ID NO: 47670 - DNA, 31 bp, synthetic construct; identical to SEQ ID NO: 5405
  misc_feature 1..31: note = Probe
  source 1..31: mol_type = other DNA

SEQ ID NO: 47671 - DNA, 32 bp, synthetic construct; identical to SEQ ID NO: 19773
  misc_feature 1..32: note = Probe
  source 1..32: mol_type = other DNA

SEQ ID NO: 47672 - DNA, 40 bp, synthetic construct
  misc_feature 1..40: note = Probe
  source 1..40: mol_type = other DNA
ctttgggtgctaatggtggagttaaagactttttctctga

SEQ ID NO: 47673 - DNA, 43 bp, synthetic construct; identical to SEQ ID NO: 5406
  misc_feature 1..43: note = Probe
  source 1..43: mol_type = other DNA

SEQ ID NO: 47674 - DNA, 45 bp, synthetic construct
  misc_feature 1..45: note = Probe
  source 1..45: mol_type = other DNA
ctttgtcaaagttaaattataggctaaatcctatatatcttaatg

SEQ ID NO: 47675 - DNA, 26 bp, synthetic construct
  misc_feature 1..26: note = Probe
  source 1..26: mol_type = other DNA
cttttaagttaaagattaagagaacc

SEQ ID NO: 47676 - DNA, 27 bp, synthetic construct
  misc_feature 1..27: note = Probe
  source 1..27: mol_type = other DNA
cttttaagttaaagattaagagaacca

SEQ ID NO: 47677 - DNA, 32 bp, synthetic construct; identical to SEQ ID NO: 31154
  misc_feature 1..32: note = Probe
  source 1..32: mol_type = other DNA

SEQ ID NO: 47678 - DNA, 44 bp, synthetic construct
  misc_feature 1..44: note = Probe
  source 1..44: mol_type = other DNA
cttttaagttaaagattaagagaaccaacacctctttacagtga

SEQ ID NO: 47679 - DNA, 46 bp, synthetic construct; identical to SEQ ID NO: 31159
  misc_feature 1..46: note = Probe
  source 1..46: mol_type = other DNA

SEQ ID NO: 47680 - DNA, 48 bp, synthetic construct
  misc_feature 1..48: note = Probe
  source 1..48: mol_type = other DNA
cttttaagttaaagattaagagaaccaacacctctttacagtgaaatg

SEQ ID NO: 47681 - DNA, 49 bp, synthetic construct; identical to SEQ ID NO: 5407
  misc_feature 1..49: note = Probe
  source 1..49: mol_type = other DNA

SEQ ID NO: 47682 - DNA, 50 bp, synthetic construct; identical to SEQ ID NO: 5408
  misc_feature 1..50: note = Probe
  source 1..50: mol_type = other DNA

SEQ ID NO: 47683 - DNA, 23 bp, synthetic construct
  misc_feature 1..23: note = Probe
  source 1..23: mol_type = other DNA
cttttttcccggcggcgggagaa

SEQ ID NO: 47684 - DNA, 25 bp, synthetic construct
  misc_feature 1..25: note = Probe
  source 1..25: mol_type = other DNA
cttttttcccggcggcgggagaagt

SEQ ID NO: 47685 - DNA, 17 bp, synthetic construct
  misc_feature 1..17: note = Probe
  source 1..17: mol_type = other DNA
gaaaaagtcatggaggc

SEQ ID NO: 47686 - DNA, 21 bp, synthetic construct
  misc_feature 1..21: note = Probe
  source 1..21: mol_type = other DNA
gaaaaagtcatggaggccatg

SEQ ID NO: 47687 - DNA, 24 bp, synthetic construct
  misc_feature 1..24: note = Probe
  source 1..24: mol_type = other DNA
gaaaaagtcatggaggccatgggg

SEQ ID NO: 47688 - DNA, 26 bp, synthetic construct
  misc_feature 1..26: note = Probe
  source 1..26: mol_type = other DNA
gaaaaagtcatggaggccatggggtt

SEQ ID NO: 47689 - DNA, 28 bp, synthetic construct
  misc_feature 1..28: note = Probe
  source 1..28: mol_type = other DNA
gaaaaagtcatggaggccatggggttgg

SEQ ID NO: 47690 - DNA, 29 bp, synthetic construct
  misc_feature 1..29: note = Probe
  source 1..29: mol_type = other DNA
gaaaaagtcatggaggccatggggttggc

SEQ ID NO: 47691 - DNA, 31 bp, synthetic construct; identical to SEQ ID NO: 5416
  misc_feature 1..31: note = Probe
  source 1..31: mol_type = other DNA

SEQ ID NO: 47692 - DNA, 50 bp, synthetic construct; identical to SEQ ID NO: 5419
  misc_feature 1..50: note = Probe
  source 1..50: mol_type = other DNA

SEQ ID NO: 47693 - DNA, 24 bp, synthetic construct
  misc_feature 1..24: note = Probe
  source 1..24: mol_type = other DNA
gaaaacctttttccaaggacaaat

SEQ ID NO: 47694 - DNA, 24 bp, synthetic construct
  misc_feature 1..24: note = Probe
  source 1..24: mol_type = other DNA
gaaaatgttggttatacccttccc

SEQ ID NO: 47695 - DNA, 25 bp, synthetic construct
  misc_feature 1..25: note = Probe
  source 1..25: mol_type = other DNA
gaaaatgttggttatacccttcccg

SEQ ID NO: 47696 - DNA, 28 bp, synthetic construct
  misc_feature 1..28: note = Probe
  source 1..28: mol_type = other DNA
gaaaatgttggttatacccttcccgtac

SEQ ID NO: 47697 - DNA, 29 bp, synthetic construct
  misc_feature 1..29: note = Probe
  source 1..29: mol_type = other DNA
gaaaatgttggttatacccttcccgtact

SEQ ID NO: 47698 - DNA, 30 bp, synthetic construct; identical to SEQ ID NO: 13310
  misc_feature 1..30: note = Probe
  source 1..30: mol_type = other DNA

SEQ ID NO: 47699 - DNA, 31 bp, synthetic construct; identical to SEQ ID NO: 19801
  misc_feature 1..31: note = Probe
  source 1..31: mol_type = other DNA

SEQ ID NO: 47700 - DNA, 18 bp, synthetic construct
  misc_feature 1..18: note = Probe
  source 1..18: mol_type = other DNA
gaaaatgtttagacgggc

SEQ ID NO: 47701 - DNA, 21 bp, synthetic construct
  misc_feature 1..21: note = Probe
  source 1..21: mol_type = other DNA
gaaaatgtttagacgggctca

SEQ ID NO: 47702 - DNA, 23 bp, synthetic construct
  misc_feature 1..23: note = Probe
  source 1..23: mol_type = other DNA
gaaaatgtttagacgggctcaca

SEQ ID NO: 47703 - DNA, 30 bp, synthetic construct; identical to SEQ ID NO: 861
  misc_feature 1..30: note = Probe
  source 1..30: mol_type = other DNA

SEQ ID NO: 47704 - DNA, 33 bp, synthetic construct; identical to SEQ ID NO: 864
  misc_feature 1..33: note = Probe
  source 1..33: mol_type = other DNA

SEQ ID NO: 47705 - DNA, 34 bp, synthetic construct; identical to SEQ ID NO: 31189
  misc_feature 1..34: note = Probe
  source 1..34: mol_type = other DNA

SEQ ID NO: 47706 - DNA, 37 bp, synthetic construct
  misc_feature 1..37: note = Probe
  source 1..37: mol_type = other DNA
gaaaatgtttagacgggctcacatcaccccataaaca

SEQ ID NO: 47707 - DNA, 38 bp, synthetic construct; identical to SEQ ID NO: 19810
  misc_feature 1..38: note = Probe
  source 1..38: mol_type = other DNA

SEQ ID NO: 47708 - DNA, 39 bp, synthetic construct; identical to SEQ ID NO: 5426
  misc_feature 1..39: note = Probe
  source 1..39: mol_type = other DNA

SEQ ID NO: 47709 - DNA, 40 bp, synthetic construct; identical to SEQ ID NO: 5427
  misc_feature 1..40: note = Probe
  source 1..40: mol_type = other DNA

SEQ ID NO: 47710 - DNA, 41 bp, synthetic construct; identical to SEQ ID NO: 5428
  misc_feature 1..41: note = Probe
  source 1..41: mol_type = other DNA

SEQ ID NO: 47711 - DNA, 42 bp, synthetic construct; identical to SEQ ID NO: 5429
  misc_feature 1..42: note = Probe
  source 1..42: mol_type = other DNA

SEQ ID NO: 47712 - DNA, 46 bp, synthetic construct
  misc_feature 1..46: note = Probe
  source 1..46: mol_type = other DNA
gaaaatgtttagacgggctcacatcaccccataaacaaataggttt

SEQ ID NO: 47713 - DNA, 38 bp, synthetic construct; identical to SEQ ID NO: 19816
  misc_feature 1..38: note = Probe
  source 1..38: mol_type = other DNA

SEQ ID NO: 47714 - DNA, 20 bp, synthetic construct
  misc_feature 1..20: note = Probe
  source 1..20: mol_type = other DNA
gaaaccatcctctgctaggt

SEQ ID NO: 47715 - DNA, 17 bp, synthetic construct
  misc_feature 1..17: note = Probe
  source 1..17: mol_type = other DNA
gaaaccgggcggaaaca

SEQ ID NO: 47716 - DNA, 20 bp, synthetic construct
  misc_feature 1..20: note = Probe
  source 1..20: mol_type = other DNA
gaaaccgggcggaaacacct

SEQ ID NO: 47717 - DNA, 18 bp, synthetic construct
  misc_feature 1..18: note = Probe
  source 1..18: mol_type = other DNA
gaaagctcacaagaactg

SEQ ID NO: 47718 - DNA, 20 bp, synthetic construct
  misc_feature 1..20: note = Probe
  source 1..20: mol_type = other DNA
gaaagctcacaagaactgct

SEQ ID NO: 47719 - DNA, 25 bp, synthetic construct
  misc_feature 1..25: note = Probe
  source 1..25: mol_type = other DNA
gaaagctcacaagaactgctaactc

SEQ ID NO: 47720 - DNA, 26 bp, synthetic construct
  misc_feature 1..26: note = Probe
  source 1..26: mol_type = other DNA
gaaagctcacaagaactgctaactca

SEQ ID NO: 47721 - DNA, 28 bp, synthetic construct
  misc_feature 1..28: note = Probe
  source 1..28: mol_type = other DNA
gaaagctcacaagaactgctaactcatg

SEQ ID NO: 47722 - DNA, 39 bp, synthetic construct
  misc_feature 1..39: note = Probe
  source 1..39: mol_type = other DNA
gaaagctcacaagaactgctaactcatgcccccatgtct

SEQ ID NO: 47723 - DNA, 50 bp, synthetic construct; identical to SEQ ID NO: 879
  misc_feature 1..50: note = Probe
  source 1..50: mol_type = other DNA

SEQ ID NO: 47724 - DNA, 33 bp, synthetic construct; identical to SEQ ID NO: 19827
  misc_feature 1..33: note = Probe
  source 1..33: mol_type = other DNA

SEQ ID NO: 47725 - DNA, 36 bp, synthetic construct; identical to SEQ ID NO: 5436
  misc_feature 1..36: note = Probe
  source 1..36: mol_type = other DNA

SEQ ID NO: 47726 - DNA, 30 bp, synthetic construct; identical to SEQ ID NO: 19830
  misc_feature 1..30: note = Probe
  source 1..30: mol_type = other DNA

SEQ ID NO: 47727 - DNA, 34 bp, synthetic construct; identical to SEQ ID NO: 19833
  misc_feature 1..34: note = Probe
  source 1..34: mol_type = other DNA

SEQ ID NO: 47728 - DNA, 36 bp, synthetic construct; identical to SEQ ID NO: 5439
  misc_feature 1..36: note = Probe
  source 1..36: mol_type = other DNA

SEQ ID NO: 47729 - DNA, 36 bp, synthetic construct; identical to SEQ ID NO: 19839
  misc_feature 1..36: note = Probe
  source 1..36: mol_type = other DNA

SEQ ID NO: 47730 - DNA, 39 bp, synthetic construct
  misc_feature 1..39: note = Probe
  source 1..39: mol_type = other DNA
gaaatacaacgatggtttttcatatcattggtcgtggtt

SEQ ID NO: 47731 - DNA, 46 bp, synthetic construct; identical to SEQ ID NO: 31213
  misc_feature 1..46: note = Probe
  source 1..46: mol_type = other DNA

SEQ ID NO: 47732 - DNA, 50 bp, synthetic construct; identical to SEQ ID NO: 5440
  misc_feature 1..50: note = Probe
  source 1..50: mol_type = other DNA

SEQ ID NO: 47733 - DNA, 36 bp, synthetic construct; identical to SEQ ID NO: 5445
  misc_feature 1..36: note = Probe
  source 1..36: mol_type = other DNA

SEQ ID NO: 47734 - DNA, 39 bp, synthetic construct; identical to SEQ ID NO: 5448
  misc_feature 1..39: note = Probe
  source 1..39: mol_type = other DNA

SEQ ID NO: 47735 - DNA, 19 bp, synthetic construct
  misc_feature 1..19: note = Probe
  source 1..19: mol_type = other DNA
gaaccaacacctctttaca

SEQ ID NO: 47736 - DNA, 22 bp, synthetic construct
  misc_feature 1..22: note = Probe
  source 1..22: mol_type = other DNA
gaaccaacacctctttacagtg

SEQ ID NO: 47737 - DNA, 23 bp, synthetic construct
  misc_feature 1..23: note = Probe
  source 1..23: mol_type = other DNA
gaaccaacacctctttacagtga

SEQ ID NO: 47738 - DNA, 24 bp, synthetic construct
  misc_feature 1..24: note = Probe
  source 1..24: mol_type = other DNA
gaaccaacacctctttacagtgaa

SEQ ID NO: 47739 - DNA, 25 bp, synthetic construct
  misc_feature 1..25: note = Probe
  source 1..25: mol_type = other DNA
gaaccaacacctctttacagtgaaa

SEQ ID NO: 47740 - DNA, 26 bp, synthetic construct
  misc_feature 1..26: note = Probe
  source 1..26: mol_type = other DNA
gaaccaacacctctttacagtgaaat

SEQ ID NO: 47741 - DNA, 18 bp, synthetic construct
  misc_feature 1..18: note = Probe
  source 1..18: mol_type = other DNA
gaaccctgctcgctgcgg

SEQ ID NO: 47742 - DNA, 20 bp, synthetic construct
  misc_feature 1..20: note = Probe
  source 1..20: mol_type = other DNA
gaacctcagagggggcagct

SEQ ID NO: 47743 - DNA, 27 bp, synthetic construct
  misc_feature 1..27: note = Probe
  source 1..27: mol_type = other DNA
gaacctcagagggggcagctgccattt

SEQ ID NO: 47744 - DNA, 22 bp, synthetic construct
  misc_feature 1..22: note = Probe
  source 1..22: mol_type = other DNA
gaacgttttaatccctgcaact

SEQ ID NO: 47745 - DNA, 16 bp, synthetic construct
  misc_feature 1..16: note = Probe
  source 1..16: mol_type = other DNA
gaactgctaactcatg

SEQ ID NO: 47746 - DNA, 26 bp, synthetic construct
  misc_feature 1..26: note = Probe
  source 1..26: mol_type = other DNA
gaactgctaactcatgcccccatgtc

SEQ ID NO: 47747 - DNA, 31 bp, synthetic construct; identical to SEQ ID NO: 19862
  misc_feature 1..31: note = Probe
  source 1..31: mol_type = other DNA

SEQ ID NO: 47748 - DNA, 42 bp, synthetic construct; identical to SEQ ID NO: 5466
  misc_feature 1..42: note = Probe
  source 1..42: mol_type = other DNA

SEQ ID NO: 47749 - DNA, 43 bp, synthetic construct; identical to SEQ ID NO: 5467
  misc_feature 1..43: note = Probe
  source 1..43: mol_type = other DNA

SEQ ID NO: 47750 - DNA, 44 bp, synthetic construct; identical to SEQ ID NO: 5468
  misc_feature 1..44: note = Probe
  source 1..44: mol_type = other DNA

SEQ ID NO: 47751 - DNA, 45 bp, synthetic construct; identical to SEQ ID NO: 5469
  misc_feature 1..45: note = Probe
  source 1..45: mol_type = other DNA

SEQ ID NO: 47752 - DNA, 50 bp, synthetic construct; identical to SEQ ID NO: 5472
  misc_feature 1..50: note = Probe
  source 1..50: mol_type = other DNA

SEQ ID NO: 47753 - DNA, 26 bp, synthetic construct
  misc_feature 1..26: note = Probe
  source 1..26: mol_type = other DNA
gaagaagcagcttcaaacctgccggg

SEQ ID NO: 47754 - DNA, 27 bp, synthetic construct
  misc_feature 1..27: note = Probe
  source 1..27: mol_type = other DNA
gaagaagcagcttcaaacctgccgggg

SEQ ID NO: 47755 - DNA, 28 bp, synthetic construct
  misc_feature 1..28: note = Probe
  source 1..28: mol_type = other DNA
gaagaagcagcttcaaacctgccggggc

SEQ ID NO: 47756 - DNA, 29 bp, synthetic construct
  misc_feature 1..29: note = Probe
  source 1..29: mol_type = other DNA
gaagaagcagcttcaaacctgccggggct

SEQ ID NO: 47757 - DNA, 30 bp, synthetic construct; identical to SEQ ID NO: 5478
  misc_feature 1..30: note = Probe
  source 1..30: mol_type = other DNA

SEQ ID NO: 47758 - DNA, 31 bp, synthetic construct; identical to SEQ ID NO: 5479
  misc_feature 1..31: note = Probe
  source 1..31: mol_type = other DNA

SEQ ID NO: 47759 - DNA, 32 bp, synthetic construct; identical to SEQ ID NO: 5480
  misc_feature 1..32: note = Probe
  source 1..32: mol_type = other DNA

SEQ ID NO: 47760 - DNA, 33 bp, synthetic construct; identical to SEQ ID NO: 5481
  misc_feature 1..33: note = Probe
  source 1..33: mol_type = other DNA

SEQ ID NO: 47761 - DNA, 23 bp, synthetic construct
  misc_feature 1..23: note = Probe
  source 1..23: mol_type = other DNA
gaagagcccggatagctcagtcg

SEQ ID NO: 47762 - DNA, 29 bp, synthetic construct
  misc_feature 1..29: note = Probe
  source 1..29: mol_type = other DNA
gaagattgagggttcgagtcccttcgtgg

SEQ ID NO: 47763 - DNA, 31 bp, synthetic construct; identical to SEQ ID NO: 19909
  misc_feature 1..31: note = Probe
  source 1..31: mol_type = other DNA

SEQ ID NO: 47764 - DNA, 31 bp, synthetic construct
  misc_feature 1..31: note = Probe
  source 1..31: mol_type = other DNA
gaagattgcaggttcgagtcctgccgcggtc

SEQ ID NO: 47765 - DNA, 16 bp, synthetic construct
  misc_feature 1..16: note = Probe
  source 1..16: mol_type = other DNA
gaagcagcttcaaacc

SEQ ID NO: 47766 - DNA, 17 bp, synthetic construct
  misc_feature 1..17: note = Probe
  source 1..17: mol_type = other DNA
gaagcagcttcaaacct

SEQ ID NO: 47767 - DNA, 24 bp, synthetic construct
  misc_feature 1..24: note = Probe
  source 1..24: mol_type = other DNA
gaagcagcttcaaacctgccgggg

SEQ ID NO: 47768 - DNA, 25 bp, synthetic construct
  misc_feature 1..25: note = Probe
  source 1..25: mol_type = other DNA
gaagcagcttcaaacctgccggggc

SEQ ID NO: 47769 - DNA, 27 bp, synthetic construct
  misc_feature 1..27: note = Probe
  source 1..27: mol_type = other DNA
gaagcagcttcaaacctgccggggctt

SEQ ID NO: 47770 - DNA, 29 bp, synthetic construct
  misc_feature 1..29: note = Probe
  source 1..29: mol_type = other DNA
gaagcagcttcaaacctgccggggcttct

SEQ ID NO: 47771 - DNA, 30 bp, synthetic construct; identical to SEQ ID NO: 5497
  misc_feature 1..30: note = Probe
  source 1..30: mol_type = other DNA

SEQ ID NO: 47772 - DNA, 50 bp, synthetic construct; identical to SEQ ID NO: 5504
  misc_feature 1..50: note = Probe
  source 1..50: mol_type = other DNA

SEQ ID NO: 47773 - DNA, 50 bp, synthetic construct; identical to SEQ ID NO: 5505
  misc_feature 1..50: note = Probe
  source 1..50: mol_type = other DNA

SEQ ID NO: 47774 - DNA, 16 bp, synthetic construct
  misc_feature 1..16: note = Probe
  source 1..16: mol_type = other DNA
gaagcgggtgctctta

SEQ ID NO: 47775 - DNA, 17 bp, synthetic construct
  misc_feature 1..17: note = Probe
  source 1..17: mol_type = other DNA
gaagcgggtgctcttat

SEQ ID NO: 47776 - DNA, 18 bp, synthetic construct
  misc_feature 1..18: note = Probe
  source 1..18: mol_type = other DNA
gaagcgggtgctcttatt

SEQ ID NO: 47777 - DNA, 19 bp, synthetic construct
  misc_feature 1..19: note = Probe
  source 1..19: mol_type = other DNA
gaagcgggtgctcttattt

SEQ ID NO: 47778 - DNA, 20 bp, synthetic construct
  misc_feature 1..20: note = Probe
  source 1..20: mol_type = other DNA
gaagcgggtgctcttatttt

SEQ ID NO: 47779 - DNA, 21 bp, synthetic construct
  misc_feature 1..21: note = Probe
  source 1..21: mol_type = other DNA
gaagcgggtgctcttattttt

SEQ ID NO: 47780 - DNA, 35 bp, synthetic construct
  misc_feature 1..35: note = Probe
  source 1..35: mol_type = other DNA
gaagcgtgctgggcccataacccagaggtcgatgg

SEQ ID NO: 47781 - DNA, 50 bp, synthetic construct
  misc_feature 1..50: note = Probe
  source 1..50: mol_type = other DNA
gaagcgtgctgggcccataacccagaggtcgatggatcgaaaccatcctc

SEQ ID NO: 47782 - DNA, 33 bp, synthetic construct; identical to SEQ ID NO: 892
  misc_feature 1..33: note = Probe
  source 1..33: mol_type = other DNA

SEQ ID NO: 47783 - DNA, 34 bp, synthetic construct; identical to SEQ ID NO: 5512
  misc_feature 1..34: note = Probe
  source 1..34: mol_type = other DNA

SEQ ID NO: 47784 - DNA, 35 bp, synthetic construct; identical to SEQ ID NO: 5513
  misc_feature 1..35: note = Probe
  source 1..35: mol_type = other DNA

SEQ ID NO: 47785 - DNA, 35 bp, synthetic construct; identical to SEQ ID NO: 5515
  misc_feature 1..35: note = Probe
  source 1..35: mol_type = other DNA

SEQ ID NO: 47786 - DNA, 32 bp, synthetic construct
  misc_feature 1..32: note = Probe
  source 1..32: mol_type = other DNA
gaaggttgcgtgttcaaatcacgtcggggtca

SEQ ID NO: 47787 - DNA, 35 bp, synthetic construct; identical to SEQ ID NO: 5516
  misc_feature 1..35: note = Probe
  source 1..35: mol_type = other DNA

SEQ ID NO: 47788 - DNA, 20 bp, synthetic construct
  misc_feature 1..20: note = Probe
  source 1..20: mol_type = other DNA
gaatcacgtcggggtcaaac

SEQ ID NO: 47789 - DNA, 36 bp, synthetic construct; identical to SEQ ID NO: 19958
  misc_feature 1..36: note = Probe
  source 1..36: mol_type = other DNA

SEQ ID NO: 47790 - DNA, 38 bp, synthetic construct; identical to SEQ ID NO: 19959
  misc_feature 1..38: note = Probe
  source 1..38: mol_type = other DNA

SEQ ID NO: 47791 - DNA, 39 bp, synthetic construct; identical to SEQ ID NO: 5522
  misc_feature 1..39: note = Probe
  source 1..39: mol_type = other DNA

SEQ ID NO: 47792 - DNA, 40 bp, synthetic construct; identical to SEQ ID NO: 5523
  misc_feature 1..40: note = Probe
  source 1..40: mol_type = other DNA

SEQ ID NO: 47793 - DNA, 38 bp, synthetic construct; identical to SEQ ID NO: 19962
  misc_feature 1..38: note = Probe
  source 1..38: mol_type = other DNA

SEQ ID NO: 47794 - DNA, 37 bp, synthetic construct; identical to SEQ ID NO: 13332
  misc_feature 1..37: note = Probe
  source 1..37: mol_type = other DNA

SEQ ID NO: 47795 - DNA, 38 bp, synthetic construct; identical to SEQ ID NO: 13333
  misc_feature 1..38: note = Probe
  source 1..38: mol_type = other DNA

SEQ ID NO: 47796 - DNA, 39 bp, synthetic construct; identical to SEQ ID NO: 5525
  misc_feature 1..39: note = Probe
  source 1..39: mol_type = other DNA

SEQ ID NO: 47797 - DNA, 40 bp, synthetic construct; identical to SEQ ID NO: 5526
  misc_feature 1..40: note = Probe
  source 1..40: mol_type = other DNA

SEQ ID NO: 47798 - DNA, 19 bp, synthetic construct
  misc_feature 1..19: note = Probe
  source 1..19: mol_type = other DNA
gaatcccaccgctgccaca

SEQ ID NO: 47799 - DNA, 20 bp, synthetic construct
  misc_feature 1..20: note = Probe
  source 1..20: mol_type = other DNA
gaatcccaccgctgccacac

SEQ ID NO: 47800 - DNA, 20 bp, synthetic construct
  misc_feature 1..20: note = Probe
  source 1..20: mol_type = other DNA
gaatcccaccgctgccaggt

SEQ ID NO: 47801 - DNA, 17 bp, synthetic construct
  misc_feature 1..17: note = Probe
  source 1..17: mol_type = other DNA
gaatcccactcctgaca

SEQ ID NO: 47802 - DNA, 17 bp, synthetic construct
  misc_feature 1..17: note = Probe
  source 1..17: mol_type = other DNA
gaatcccacttctgaca

SEQ ID NO: 47803 - DNA, 18 bp, synthetic construct
  misc_feature 1..18: note = Probe
  source 1..18: mol_type = other DNA
gaatcccacttctgacac

SEQ ID NO: 47804 - DNA, 17 bp, synthetic construct
  misc_feature 1..17: note = Probe
  source 1..17: mol_type = other DNA
gaatcccagcggtgcct

SEQ ID NO: 47805 - DNA, 20 bp, synthetic construct
  misc_feature 1..20: note = Probe
  source 1..20: mol_type = other DNA
gaatcccagcggtgcctccg

SEQ ID NO: 47806 - DNA, 19 bp, synthetic construct
  misc_feature 1..19: note = Probe
  source 1..19: mol_type = other DNA
gaatcccatcctcgtcgct

SEQ ID NO: 47807 - DNA, 20 bp, synthetic construct
  misc_feature 1..20: note = Probe
  source 1..20: mol_type = other DNA
gaatccggctcgaaggacga

SEQ ID NO: 47808 - DNA, 18 bp, synthetic construct
  misc_feature 1..18: note = Probe
  source 1..18: mol_type = other DNA
gaatcctgccgactacga

SEQ ID NO: 47809 - DNA, 18 bp, synthetic construct
  misc_feature 1..18: note = Probe
  source 1..18: mol_type = other DNA
gaatcctgccgactacgg

SEQ ID NO: 47810 - DNA, 20 bp, synthetic construct
  misc_feature 1..20: note = Probe
  source 1..20: mol_type = other DNA
gaatcctgccgactacggca

SEQ ID NO: 47811 - DNA, 18 bp, synthetic construct
  misc_feature 1..18: note = Probe
  source 1..18: mol_type = other DNA
gaatcctgccgactacgt

SEQ ID NO: 47812 - DNA, 20 bp, synthetic construct
  misc_feature 1..20: note = Probe
  source 1..20: mol_type = other DNA
gaatcctgccgactacgtca

SEQ ID NO: 47813 - DNA, 27 bp, synthetic construct
  misc_feature 1..27: note = Probe
  source 1..27: mol_type = other DNA
gaatctgacaacagaggcttacgaccc

SEQ ID NO: 47814 - DNA, 28 bp, synthetic construct
  misc_feature 1..28: note = Probe
  source 1..28: mol_type = other DNA
gaatctgacaacagaggcttacgacccc

SEQ ID NO: 47815 - DNA, 38 bp, synthetic construct; identical to SEQ ID NO: 5537
  misc_feature 1..38: note = Probe
  source 1..38: mol_type = other DNA

SEQ ID NO: 47816 - DNA, 39 bp, synthetic construct; identical to SEQ ID NO: 5538
  misc_feature 1..39: note = Probe
  source 1..39: mol_type = other DNA

SEQ ID NO: 47817 - DNA, 40 bp, synthetic construct; identical to SEQ ID NO: 5539
  misc_feature 1..40: note = Probe
  source 1..40: mol_type = other DNA

SEQ ID NO: 47818 - DNA, 28 bp, synthetic construct
  misc_feature 1..28: note = Probe
  source 1..28: mol_type = other DNA
gaatcttagctttgggtgctaatggtgg

SEQ ID NO: 47819 - DNA, 33 bp, synthetic construct; identical to SEQ ID NO: 5540
  misc_feature 1..33: note = Probe
  source 1..33: mol_type = other DNA

SEQ ID NO: 47820 - DNA, 37 bp, synthetic construct; identical to SEQ ID NO: 19988
  misc_feature 1..37: note = Probe
  source 1..37: mol_type = other DNA

SEQ ID NO: 47821 - DNA, 38 bp, synthetic construct
  misc_feature 1..38: note = Probe
  source 1..38: mol_type = other DNA
gaatcttagctttgggtgctaatggtggagttaaagac

SEQ ID NO: 47822 - DNA, 50 bp, synthetic construct; identical to SEQ ID NO: 5541
  misc_feature 1..50: note = Probe
  source 1..50: mol_type = other DNA

SEQ ID NO: 47823 - DNA, 46 bp, synthetic construct
  misc_feature 1..46: note = Probe
  source 1..46: mol_type = other DNA
gaatgatttcgactcattaaattatgataatcatatttaccaaatg

SEQ ID NO: 47824 - DNA, 25 bp, synthetic construct
  misc_feature 1..25: note = Probe
  source 1..25: mol_type = other DNA
gaattgcaaattcgaagaagcagct

SEQ ID NO: 47825 - DNA, 32 bp, synthetic construct
  misc_feature 1..32: note = Probe
  source 1..32: mol_type = other DNA
gaattgcaaattcgaagaagcagcttcaaacc

SEQ ID NO: 47826 - DNA, 33 bp, synthetic construct
  misc_feature 1..33: note = Probe
  source 1..33: mol_type = other DNA
gaattgcaaattcgaagaagcagcttcaaacct

SEQ ID NO: 47827 - DNA, 40 bp, synthetic construct
  misc_feature 1..40: note = Probe
  source 1..40: mol_type = other DNA
gaattgcaaattcgaagaagcagcttcaaacctgccgggg

SEQ ID NO: 47828 - DNA, 45 bp, synthetic construct; identical to SEQ ID NO: 5544
  misc_feature 1..45: note = Probe
  source 1..45: mol_type = other DNA

SEQ ID NO: 47829 - DNA, 46 bp, synthetic construct; identical to SEQ ID NO: 5545
  misc_feature 1..46: note = Probe
  source 1..46: mol_type = other DNA

SEQ ID NO: 47830 - DNA, 16 bp, synthetic construct
  misc_feature 1..16: note = Probe
  source 1..16: mol_type = other DNA
gacaacagaggcttac

SEQ ID NO: 47831 - DNA, 19 bp, synthetic construct
  misc_feature 1..19: note = Probe
  source 1..19: mol_type = other DNA
gacaacagaggcttacgac

SEQ ID NO: 47832 - DNA, 23 bp, synthetic construct
  misc_feature 1..23: note = Probe
  source 1..23: mol_type = other DNA
gacaacagaggcttacgacccct

SEQ ID NO: 47833 - DNA, 24 bp, synthetic construct
  misc_feature 1..24: note = Probe
  source 1..24: mol_type = other DNA
gacaacagaggcttacgacccctt

SEQ ID NO: 47834 - DNA, 28 bp, synthetic construct
  misc_feature 1..28: note = Probe
  source 1..28: mol_type = other DNA
gacaacagaggcttacgaccccttattt

SEQ ID NO: 47835 - DNA, 29 bp, synthetic construct
  misc_feature 1..29: note = Probe
  source 1..29: mol_type = other DNA
gacaacagaggcttacgaccccttattta

SEQ ID NO: 47836 - DNA, 32 bp, synthetic construct; identical to SEQ ID NO: 5551
  misc_feature 1..32: note = Probe
  source 1..32: mol_type = other DNA

SEQ ID NO: 47837 - DNA, 33 bp, synthetic construct; identical to SEQ ID NO: 5552
  misc_feature 1..33: note = Probe
  source 1..33: mol_type = other DNA

SEQ ID NO: 47838 - DNA, 34 bp, synthetic construct; identical to SEQ ID NO: 5553
  misc_feature 1..34: note = Probe
  source 1..34: mol_type = other DNA

SEQ ID NO: 47839 - DNA, 21 bp, synthetic construct
  misc_feature 1..21: note = Probe
  source 1..21: mol_type = other DNA
gacaacattcaaaaaagagta

SEQ ID NO: 47840 - DNA, 22 bp, synthetic construct
  misc_feature 1..22: note = Probe
  source 1..22: mol_type = other DNA
gacaacattcaaaaaagagtaa

SEQ ID NO: 47841 - DNA, 23 bp, synthetic construct
  misc_feature 1..23: note = Probe
  source 1..23: mol_type = other DNA
gacaacattcaaaaaagagtaat

SEQ ID NO: 47842 - DNA, 24 bp, synthetic construct
  misc_feature 1..24: note = Probe
  source 1..24: mol_type = other DNA
gacaacattcaaaaaagagtaata

SEQ ID NO: 47843 - DNA, 16 bp, synthetic construct
  misc_feature 1..16: note = Probe
  source 1..16: mol_type = other DNA
gacaagtgcggttttt

SEQ ID NO: 47844 - DNA, 17 bp, synthetic construct
  misc_feature 1..17: note = Probe
  source 1..17: mol_type = other DNA
gacaagtgcggtttttt

SEQ ID NO: 47845 - DNA, 26 bp, synthetic construct
  misc_feature 1..26: note = Probe
  source 1..26: mol_type = other DNA
gacaggggttaggcctctttttacca

SEQ ID NO: 47846 - DNA, 28 bp, synthetic construct
  misc_feature 1..28: note = Probe
  source 1..28: mol_type = other DNA
gacaggggttaggcctctttttaccagc

SEQ ID NO: 47847 - DNA, 29 bp, synthetic construct
  misc_feature 1..29: note = Probe
  source 1..29: mol_type = other DNA
gacaggggttaggcctctttttaccagct

SEQ ID NO: 47848 - DNA, 27 bp, synthetic construct
  misc_feature 1..27: note = Probe
  source 1..27: mol_type = other DNA
gaccaagagccttcaaagccctcagta

SEQ ID NO: 47849 - DNA, 34 bp, synthetic construct; identical to SEQ ID NO: 5560
  misc_feature 1..34: note = Probe
  source 1..34: mol_type = other DNA

SEQ ID NO: 47850 - DNA, 19 bp, synthetic construct
  misc_feature 1..19: note = Probe
  source 1..19: mol_type = other DNA
gaccacgtggcctaatgga

SEQ ID NO: 47851 - DNA, 18 bp, synthetic construct
  misc_feature 1..18: note = Probe
  source 1..18: mol_type = other DNA
gacccagtggcctaatgg

SEQ ID NO: 47852 - DNA, 19 bp, synthetic construct
  misc_feature 1..19: note = Probe
  source 1..19: mol_type = other DNA
gacccagtggcctaatgga

SEQ ID NO: 47853 - DNA, 20 bp, synthetic construct
  misc_feature 1..20: note = Probe
  source 1..20: mol_type = other DNA
gacccagtggcctaatggat

SEQ ID NO: 47854 - DNA, 23 bp, synthetic construct
  misc_feature 1..23: note = Probe
  source 1..23: mol_type = other DNA
gacccagtggcctaatggataag

SEQ ID NO: 47855 - DNA, 28 bp, synthetic construct
  misc_feature 1..28: note = Probe
  source 1..28: mol_type = other DNA
gacccagtggcctaatggataaggcatc

SEQ ID NO: 47856 - DNA, 37 bp, synthetic construct
  misc_feature 1..37: note = Probe
  source 1..37: mol_type = other DNA
gacccagtggcctaatggataaggcatcagcctccgg

SEQ ID NO: 47857 - DNA, 22 bp, synthetic construct
  misc_feature 1..22: note = Probe
  source 1..22: mol_type = other DNA
gacccgggttcgattcccggcc

SEQ ID NO: 47858 - DNA, 31 bp, synthetic construct; identical to SEQ ID NO: 5567
  misc_feature 1..31: note = Probe
  source 1..31: mol_type = other DNA

SEQ ID NO: 47859 - DNA, 30 bp, synthetic construct
  misc_feature 1..30: note = Probe
  source 1..30: mol_type = other DNA
gacccgggttcgattcccggccaacgcagc

SEQ ID NO: 47860 - DNA, 31 bp, synthetic construct; identical to SEQ ID NO: 5568
  misc_feature 1..31: note = Probe
  source 1..31: mol_type = other DNA

SEQ ID NO: 47861 - DNA, 28 bp, synthetic construct
  misc_feature 1..28: note = Probe
  source 1..28: mol_type = other DNA
gacccttttggatgttcgcaaccccttt

SEQ ID NO: 47862 - DNA, 19 bp, synthetic construct
  misc_feature 1..19: note = Probe
  source 1..19: mol_type = other DNA
gaccgcgtggcctaatgga

SEQ ID NO: 47863 - DNA, 31 bp, synthetic construct
  misc_feature 1..31: note = Probe
  source 1..31: mol_type = other DNA
gaccgcgtggcctaatggataaggcgtctga

SEQ ID NO: 47864 - DNA, 26 bp, synthetic construct
  misc_feature 1..26: note = Probe
  source 1..26: mol_type = other DNA
gaccggggttcaattccccgacgggg

SEQ ID NO: 47865 - DNA, 29 bp, synthetic construct
  misc_feature 1..29: note = Probe
  source 1..29: mol_type = other DNA
gaccggggttcaattccccgacggggagg

SEQ ID NO: 47866 - DNA, 31 bp, synthetic construct; identical to SEQ ID NO: 5571
  misc_feature 1..31: note = Probe
  source 1..31: mol_type = other DNA

SEQ ID NO: 47867 - DNA, 22 bp, synthetic construct
  misc_feature 1..22: note = Probe
  source 1..22: mol_type = other DNA
gaccggggttcgattccccgac

SEQ ID NO: 47868 - DNA, 23 bp, synthetic construct
  misc_feature 1..23: note = Probe
  source 1..23: mol_type = other DNA
gaccggggttcgattccccgacg

SEQ ID NO: 47869 - DNA, 24 bp, synthetic construct
  misc_feature 1..24: note = Probe
  source 1..24: mol_type = other DNA
gaccggggttcgattccccgacgg

SEQ ID NO: 47870 - DNA, 25 bp, synthetic construct
  misc_feature 1..25: note = Probe
  source 1..25: mol_type = other DNA
gaccggggttcgattccccgacggg

SEQ ID NO: 47871 - DNA, 29 bp, synthetic construct
  misc_feature 1..29: note = Probe
  source 1..29: mol_type = other DNA
gaccggggttcgattccccgacggggaga

SEQ ID NO: 47872 - DNA, 30 bp, synthetic construct; identical to SEQ ID NO: 5576
  misc_feature 1..30: note = Probe
  source 1..30: mol_type = other DNA

SEQ ID NO: 47873 - DNA, 31 bp, synthetic construct; identical to SEQ ID NO: 5577
  misc_feature 1..31: note = Probe
  source 1..31: mol_type = other DNA

SEQ ID NO: 47874 - DNA, 29 bp, synthetic construct
  misc_feature 1..29: note = Probe
  source 1..29: mol_type = other DNA
gaccggggttcgattccccgacggggagg

SEQ ID NO: 47875 - DNA, 30 bp, synthetic construct; identical to SEQ ID NO: 5579
  misc_feature 1..30: note = Probe
  source 1..30: mol_type = other DNA

SEQ ID NO: 47876 - DNA, 31 bp, synthetic construct; identical to SEQ ID NO: 5580
  misc_feature 1..31: note = Probe
  source 1..31: mol_type = other DNA

SEQ ID NO: 47877 - DNA, 31 bp, synthetic construct; identical to SEQ ID NO: 5581
  misc_feature 1..31: note = Probe
  source 1..31: mol_type = other DNA

SEQ ID NO: 47878 - DNA, 30 bp, synthetic construct
  misc_feature 1..30: note = Probe
  source 1..30: mol_type = other DNA
gacctcgtggcgcaacggtagcgcgtctga

SEQ ID NO: 47879 - DNA, 33 bp, synthetic construct
  misc_feature 1..33: note = Probe
  source 1..33: mol_type = other DNA
gacctcgtggcgcaacggtagcgcgtctgactc

SEQ ID NO: 47880 - DNA, 34 bp, synthetic construct; identical to SEQ ID NO: 31336
  misc_feature 1..34: note = Probe
  source 1..34: mol_type = other DNA

SEQ ID NO: 47881 - DNA, 33 bp, synthetic construct; identical to SEQ ID NO: 5583
  misc_feature 1..33: note = Probe
  source 1..33: mol_type = other DNA

SEQ ID NO: 47882 - DNA, 16 bp, synthetic construct
  misc_feature 1..16: note = Probe
  source 1..16: mol_type = other DNA
gacgaggtggccgagt

SEQ ID NO: 47883 - DNA, 18 bp, synthetic construct
  misc_feature 1..18: note = Probe
  source 1..18: mol_type = other DNA
gacgaggtggccgagtgg

SEQ ID NO: 47884 - DNA, 20 bp, synthetic construct
  misc_feature 1..20: note = Probe
  source 1..20: mol_type = other DNA
gacgaggtggccgagtggtt

SEQ ID NO: 47885 - DNA, 21 bp, synthetic construct
  misc_feature 1..21: note = Probe
  source 1..21: mol_type = other DNA
gacgaggtggccgagtggtta

SEQ ID NO: 47886 - DNA, 23 bp, synthetic construct
  misc_feature 1..23: note = Probe
  source 1..23: mol_type = other DNA
gacgaggtggccgagtggttaag

SEQ ID NO: 47887 - DNA, 24 bp, synthetic construct
  misc_feature 1..24: note = Probe
  source 1..24: mol_type = other DNA
gacgaggtggccgagtggttaagg

SEQ ID NO: 47888 - DNA, 17 bp, synthetic construct
  misc_feature 1..17: note = Probe
  source 1..17: mol_type = other DNA
gacgggctcacatcacc

SEQ ID NO: 47889 - DNA, 18 bp, synthetic construct
  misc_feature 1..18: note = Probe
  source 1..18: mol_type = other DNA
gacgggctcacatcaccc

SEQ ID NO: 47890 - DNA, 19 bp, synthetic construct
  misc_feature 1..19: note = Probe
  source 1..19: mol_type = other DNA
gacgggctcacatcacccc

SEQ ID NO: 47891 - DNA, 20 bp, synthetic construct
  misc_feature 1..20: note = Probe
  source 1..20: mol_type = other DNA
gacgggctcacatcacccca

SEQ ID NO: 47892 - DNA, 21 bp, synthetic construct
  misc_feature 1..21: note = Probe
  source 1..21: mol_type = other DNA
gacgggctcacatcaccccat

SEQ ID NO: 47893 - DNA, 22 bp, synthetic construct
  misc_feature 1..22: note = Probe
  source 1..22: mol_type = other DNA
gacgggctcacatcaccccata

SEQ ID NO: 47894 - DNA, 23 bp, synthetic construct
  misc_feature 1..23: note = Probe
  source 1..23: mol_type = other DNA
gacgggctcacatcaccccataa

SEQ ID NO: 47895 - DNA, 26 bp, synthetic construct
  misc_feature 1..26: note = Probe
  source 1..26: mol_type = other DNA
gacgggctcacatcaccccataaaca

SEQ ID NO: 47896 - DNA, 27 bp, synthetic construct
  misc_feature 1..27: note = Probe
  source 1..27: mol_type = other DNA
gacgggctcacatcaccccataaacaa

SEQ ID NO: 47897 - DNA, 28 bp, synthetic construct
  misc_feature 1..28: note = Probe
  source 1..28: mol_type = other DNA
gacgggctcacatcaccccataaacaaa

SEQ ID NO: 47898 - DNA, 29 bp, synthetic construct
  misc_feature 1..29: note = Probe
  source 1..29: mol_type = other DNA
gacgggctcacatcaccccataaacaaat

SEQ ID NO: 47899 - DNA, 16 bp, synthetic construct
  misc_feature 1..16: note = Probe
  source 1..16: mol_type = other DNA
gactacaaaaaggatt

SEQ ID NO: 47900 - DNA, 21 bp, synthetic construct
  misc_feature 1..21: note = Probe
  source 1..21: mol_type = other DNA
gactacaaaaaggattagact

SEQ ID NO: 47901 - DNA, 22 bp, synthetic construct
  misc_feature 1..22: note = Probe
  source 1..22: mol_type = other DNA
gactacaaaaaggattagactg

SEQ ID NO: 47902 - DNA, 23 bp, synthetic construct
  misc_feature 1..23: note = Probe
  source 1..23: mol_type = other DNA
gactacaaaaaggattagactga

SEQ ID NO: 47903 - DNA, 24 bp, synthetic construct
  misc_feature 1..24: note = Probe
  source 1..24: mol_type = other DNA
gactacaaaaaggattagactgaa

SEQ ID NO: 47904 - DNA, 25 bp, synthetic construct
  misc_feature 1..25: note = Probe
  source 1..25: mol_type = other DNA
gactacaaaaaggattagactgaac

SEQ ID NO: 47905 - DNA, 26 bp, synthetic construct
  misc_feature 1..26: note = Probe
  source 1..26: mol_type = other DNA
gactacaaaaaggattagactgaacc

SEQ ID NO: 47906 - DNA, 27 bp, synthetic construct
  misc_feature 1..27: note = Probe
  source 1..27: mol_type = other DNA
gactacaaaaaggattagactgaaccg

SEQ ID NO: 47907 - DNA, 28 bp, synthetic construct
  misc_feature 1..28: note = Probe
  source 1..28: mol_type = other DNA
gactacaaaaaggattagactgaaccga

SEQ ID NO: 47908 - DNA, 29 bp, synthetic construct
  misc_feature 1..29: note = Probe
  source 1..29: mol_type = other DNA
gactacaaaaaggattagactgaaccgaa

SEQ ID NO: 47909 - DNA, 31 bp, synthetic construct; identical to SEQ ID NO: 31363
  misc_feature 1..31: note = Probe
  source 1..31: mol_type = other DNA

SEQ ID NO: 47910 - DNA, 18 bp, synthetic construct
  misc_feature 1..18: note = Probe
  source 1..18: mol_type = other DNA
gactatgagaatcgaacc

SEQ ID NO: 47911 - DNA, 29 bp, synthetic construct
  misc_feature 1..29: note = Probe
  source 1..29: mol_type = other DNA
gactatgagaatcgaacccatccctgaga

SEQ ID NO: 47912 - DNA, 31 bp, synthetic construct; identical to SEQ ID NO: 5606
  misc_feature 1..31: note = Probe
  source 1..31: mol_type = other DNA

SEQ ID NO: 47913 - DNA, 32 bp, synthetic construct; identical to SEQ ID NO: 20129
  misc_feature 1..32: note = Probe
  source 1..32: mol_type = other DNA

SEQ ID NO: 47914 - DNA, 34 bp, synthetic construct; identical to SEQ ID NO: 20130
  misc_feature 1..34: note = Probe
  source 1..34: mol_type = other DNA

SEQ ID NO: 47915 - DNA, 35 bp, synthetic construct
  misc_feature 1..35: note = Probe
  source 1..35: mol_type = other DNA
gactcattaaattatgataatcatatttaccaaat

SEQ ID NO: 47916 - DNA, 36 bp, synthetic construct; identical to SEQ ID NO: 5607
  misc_feature 1..36: note = Probe
  source 1..36: mol_type = other DNA

SEQ ID NO: 47917 - DNA, 20 bp, synthetic construct
  misc_feature 1..20: note = Probe
  source 1..20: mol_type = other DNA
gactcccggtatgggaacaa

SEQ ID NO: 47918 - DNA, 19 bp, synthetic construct
  misc_feature 1..19: note = Probe
  source 1..19: mol_type = other DNA
gactcccggtgtgggaacg

SEQ ID NO: 47919 - DNA, 20 bp, synthetic construct
  misc_feature 1..20: note = Probe
  source 1..20: mol_type = other DNA
gactcccggtgtgggaacgc

SEQ ID NO: 47920 - DNA, 22 bp, synthetic construct
  misc_feature 1..22: note = Probe
  source 1..22: mol_type = other DNA
gactctgaatccagcgatccga

SEQ ID NO: 47921 - DNA, 46 bp, synthetic construct; identical to SEQ ID NO: 20140
  misc_feature 1..46: note = Probe
  source 1..46: mol_type = other DNA

SEQ ID NO: 47922 - DNA, 44 bp, synthetic construct; identical to SEQ ID NO: 5610
  misc_feature 1..44: note = Probe
  source 1..44: mol_type = other DNA

SEQ ID NO: 47923 - DNA, 16 bp, synthetic construct
  misc_feature 1..16: note = Probe
  source 1..16: mol_type = other DNA
gagaaagctcacaaga

SEQ ID NO: 47924 - DNA, 17 bp, synthetic construct
  misc_feature 1..17: note = Probe
  source 1..17: mol_type = other DNA
gagaaagctcacaagaa

SEQ ID NO: 47925 - DNA, 24 bp, synthetic construct
  misc_feature 1..24: note = Probe
  source 1..24: mol_type = other DNA
gagaaagctcacaagaactgctaa

SEQ ID NO: 47926 - DNA, 33 bp, synthetic construct; identical to SEQ ID NO: 935
  misc_feature 1..33: note = Probe
  source 1..33: mol_type = other DNA

SEQ ID NO: 47927 - DNA, 34 bp, synthetic construct; identical to SEQ ID NO: 936
  misc_feature 1..34: note = Probe
  source 1..34: mol_type = other DNA

SEQ ID NO: 47928 - DNA, 37 bp, synthetic construct; identical to SEQ ID NO: 939
  misc_feature 1..37: note = Probe
  source 1..37: mol_type = other DNA

SEQ ID NO: 47929 - DNA, 46 bp, synthetic construct; identical to SEQ ID NO: 948
  misc_feature 1..46: note = Probe
  source 1..46: mol_type = other DNA

SEQ ID NO: 47930 - DNA, 48 bp, synthetic construct; identical to SEQ ID NO: 5613
  misc_feature 1..48: note = Probe
  source 1..48: mol_type = other DNA

SEQ ID NO: 47931 - DNA, 24 bp, synthetic construct
  misc_feature 1..24: note = Probe
  source 1..24: mol_type = other DNA
gagaaccaacacctctttacagtg

SEQ ID NO: 47932 - DNA, 25 bp, synthetic construct
  misc_feature 1..25: note = Probe
  source 1..25: mol_type = other DNA
gagaaccaacacctctttacagtga

SEQ ID NO: 47933 - DNA, 26 bp, synthetic construct
  misc_feature 1..26: note = Probe
  source 1..26: mol_type = other DNA
gagaaccaacacctctttacagtgaa

SEQ ID NO: 47934 - DNA, 27 bp, synthetic construct
  misc_feature 1..27: note = Probe
  source 1..27: mol_type = other DNA
gagaaccaacacctctttacagtgaaa

SEQ ID NO: 47935 - DNA, 28 bp, synthetic construct
  misc_feature 1..28: note = Probe
  source 1..28: mol_type = other DNA
gagaaccaacacctctttacagtgaaat

SEQ ID NO: 47936 - DNA, 30 bp, synthetic construct; identical to SEQ ID NO: 20156
  misc_feature 1..30: note = Probe
  source 1..30: mol_type = other DNA

SEQ ID NO: 47937 - DNA, 23 bp, synthetic construct
  misc_feature 1..23: note = Probe
  source 1..23: mol_type = other DNA
gagaccggggttcaattccccga

SEQ ID NO: 47938 - DNA, 28 bp, synthetic construct
  misc_feature 1..28: note = Probe
  source 1..28: mol_type = other DNA
gagaccggggttcaattccccgacgggg

SEQ ID NO: 47939 - DNA, 31 bp, synthetic construct; identical to SEQ ID NO: 5617
  misc_feature 1..31: note = Probe
  source 1..31: mol_type = other DNA

SEQ ID NO: 47940 - DNA, 33 bp, synthetic construct; identical to SEQ ID NO: 5618
  misc_feature 1..33: note = Probe
  source 1..33: mol_type = other DNA

SEQ ID NO: 47941 - DNA, 23 bp, synthetic construct
  misc_feature 1..23: note = Probe
  source 1..23: mol_type = other DNA
gagaccggggttcgattccccga

SEQ ID NO: 47942 - DNA, 25 bp, synthetic construct
  misc_feature 1..25: note = Probe
  source 1..25: mol_type = other DNA
gagaccggggttcgattccccgacg

SEQ ID NO: 47943 - DNA, 26 bp, synthetic construct
  misc_feature 1..26: note = Probe
  source 1..26: mol_type = other DNA
gagaccggggttcgattccccgacgg

SEQ ID NO: 47944 - DNA, 27 bp, synthetic construct
  misc_feature 1..27: note = Probe
  source 1..27: mol_type = other DNA
gagaccggggttcgattccccgacggg

SEQ ID NO: 47945 - DNA, 31 bp, synthetic construct; identical to SEQ ID NO: 5620
  misc_feature 1..31: note = Probe
  source 1..31: mol_type = other DNA

SEQ ID NO: 47946 - DNA, 32 bp, synthetic construct; identical to SEQ ID NO: 5621
  misc_feature 1..32: note = Probe
  source 1..32: mol_type = other DNA

SEQ ID NO: 47947 - DNA, 33 bp, synthetic construct; identical to SEQ ID NO: 20164
  misc_feature 1..33: note = Probe
  source 1..33: mol_type = other DNA

SEQ ID NO: 47948 - DNA, 32 bp, synthetic construct; identical to SEQ ID NO: 5622
  misc_feature 1..32: note = Probe
  source 1..32: mol_type = other DNA

SEQ ID NO: 47949 - DNA, 33 bp, synthetic construct; identical to SEQ ID NO: 20166
  misc_feature 1..33: note = Probe
  source 1..33: mol_type = other DNA

SEQ ID NO: 47950 - DNA, 33 bp, synthetic construct; identical to SEQ ID NO: 5623
  misc_feature 1..33: note = Probe
  source 1..33: mol_type = other DNA

SEQ ID NO: 47951 - DNA, 31 bp, synthetic construct; identical to SEQ ID NO: 5624
  misc_feature 1..31: note = Probe
  source 1..31: mol_type = other DNA

SEQ ID NO: 47952 - DNA, 32 bp, synthetic construct; identical to SEQ ID NO: 5625
  misc_feature 1..32: note = Probe
  source 1..32: mol_type = other DNA

SEQ ID NO: 47953 - DNA, 33 bp, synthetic construct; identical to SEQ ID NO: 5626
  misc_feature 1..33: note = Probe
  source 1..33: mol_type = other DNA

SEQ ID NO: 47954 - DNA, 32 bp, synthetic construct; identical to SEQ ID NO: 20189
  misc_feature 1..32: note = Probe
  source 1..32: mol_type = other DNA

SEQ ID NO: 47955 - DNA, 33 bp, synthetic construct; identical to SEQ ID NO: 20190
  misc_feature 1..33: note = Probe
  source 1..33: mol_type = other DNA

SEQ ID NO: 47956 - DNA, 34 bp, synthetic construct; identical to SEQ ID NO: 13397
  misc_feature 1..34: note = Probe
  source 1..34: mol_type = other DNA

SEQ ID NO: 47957 - DNA, 36 bp, synthetic construct; identical to SEQ ID NO: 5628
  misc_feature 1..36: note = Probe
  source 1..36: mol_type = other DNA

SEQ ID NO: 47958 - DNA, 32 bp, synthetic construct
  misc_feature 1..32: note = Probe
  source 1..32: mol_type = other DNA
gagatcctgggttcgaatcccagcggggcctg

SEQ ID NO: 47959 - DNA, 32 bp, synthetic construct
  misc_feature 1..32: note = Probe
  source 1..32: mol_type = other DNA
gagatcctgggttcgaatcccagcggggcctt

SEQ ID NO: 47960 - DNA, 28 bp, synthetic construct
  misc_feature 1..28: note = Probe
  source 1..28: mol_type = other DNA
gagatcctgggttcgaatcccagcggtg

SEQ ID NO: 47961 - DNA, 29 bp, synthetic construct
  misc_feature 1..29: note = Probe
  source 1..29: mol_type = other DNA
gagatcctgggttcgaatcccagcggtgc

SEQ ID NO: 47962 - DNA, 30 bp, synthetic construct; identical to SEQ ID NO: 20192
  misc_feature 1..30: note = Probe
  source 1..30: mol_type = other DNA

SEQ ID NO: 47963 - DNA, 31 bp, synthetic construct
  misc_feature 1..31: note = Probe
  source 1..31: mol_type = other DNA
gagatcctgggttcgaatcccagcggtgcct

SEQ ID NO: 47964 - DNA, 32 bp, synthetic construct; identical to SEQ ID NO: 5629
  misc_feature 1..32: note = Probe
  source 1..32: mol_type = other DNA

SEQ ID NO: 47965 - DNA, 34 bp, synthetic construct; identical to SEQ ID NO: 20193
  misc_feature 1..34: note = Probe
  source 1..34: mol_type = other DNA

SEQ ID NO: 47966 - DNA, 18 bp, synthetic construct
  misc_feature 1..18: note = Probe
  source 1..18: mol_type = other DNA
gagatgaaaacctttttc

SEQ ID NO: 47967 - DNA, 19 bp, synthetic construct
  misc_feature 1..19: note = Probe
  source 1..19: mol_type = other DNA
gagatgaaaacctttttcc

SEQ ID NO: 47968 - DNA, 22 bp, synthetic construct
  misc_feature 1..22: note = Probe
  source 1..22: mol_type = other DNA
gagatgaaaacctttttccaag

SEQ ID NO: 47969 - DNA, 23 bp, synthetic construct
  misc_feature 1..23: note = Probe
  source 1..23: mol_type = other DNA
gagatgaaaacctttttccaagg

SEQ ID NO: 47970 - DNA, 24 bp, synthetic construct
  misc_feature 1..24: note = Probe
  source 1..24: mol_type = other DNA
gagatgaaaacctttttccaagga

SEQ ID NO: 47971 - DNA, 26 bp, synthetic construct
  misc_feature 1..26: note = Probe
  source 1..26: mol_type = other DNA
gagatgaaaacctttttccaaggaca

SEQ ID NO: 47972 - DNA, 27 bp, synthetic construct
  misc_feature 1..27: note = Probe
  source 1..27: mol_type = other DNA
gagatgaaaacctttttccaaggacaa

SEQ ID NO: 47973 - DNA, 28 bp, synthetic construct
  misc_feature 1..28: note = Probe
  source 1..28: mol_type = other DNA
gagatgaaaacctttttccaaggacaaa

SEQ ID NO: 47974 - DNA, 29 bp, synthetic construct
  misc_feature 1..29: note = Probe
  source 1..29: mol_type = other DNA
gagatgaaaacctttttccaaggacaaat

SEQ ID NO: 47975 - DNA, 22 bp, synthetic construct
  misc_feature 1..22: note = Probe
  source 1..22: mol_type = other DNA
gagatttcaacttaacttgacc

SEQ ID NO: 47976 - DNA, 23 bp, synthetic construct
  misc_feature 1..23: note = Probe
  source 1..23: mol_type = other DNA
gagatttcaacttaacttgaccg

SEQ ID NO: 47977 - DNA, 24 bp, synthetic construct
  misc_feature 1..24: note = Probe
  source 1..24: mol_type = other DNA
gagatttcaacttaacttgaccgc

SEQ ID NO: 47978 - DNA, 25 bp, synthetic construct
  misc_feature 1..25: note = Probe
  source 1..25: mol_type = other DNA
gagatttcaacttaacttgaccgct

SEQ ID NO: 47979 - DNA, 26 bp, synthetic construct
  misc_feature 1..26: note = Probe
  source 1..26: mol_type = other DNA
gagatttcaacttaacttgaccgctc

SEQ ID NO: 47980 - DNA, 27 bp, synthetic construct
  misc_feature 1..27: note = Probe
  source 1..27: mol_type = other DNA
gagatttcaacttaacttgaccgctct

SEQ ID NO: 47981 - DNA, 28 bp, synthetic construct
  misc_feature 1..28: note = Probe
  source 1..28: mol_type = other DNA
gagatttcaacttaacttgaccgctctg

SEQ ID NO: 47982 - DNA, 29 bp, synthetic construct
  misc_feature 1..29: note = Probe
  source 1..29: mol_type = other DNA
gagatttcaacttaacttgaccgctctga

SEQ ID NO: 47983 - DNA, 30 bp, synthetic construct; identical to SEQ ID NO: 5641
  misc_feature 1..30: note = Probe
  source 1..30: mol_type = other DNA

SEQ ID NO: 47984 - DNA, 31 bp, synthetic construct; identical to SEQ ID NO: 5642
  misc_feature 1..31: note = Probe
  source 1..31: mol_type = other DNA

SEQ ID NO: 47985 - DNA, 32 bp, synthetic construct; identical to SEQ ID NO: 5643
  misc_feature 1..32: note = Probe
  source 1..32: mol_type = other DNA

SEQ ID NO: 47986 - DNA, 30 bp, synthetic construct; identical to SEQ ID NO: 13398
  misc_feature 1..30: note = Probe
  source 1..30: mol_type = other DNA

SEQ ID NO: 47987 - DNA, 48 bp, synthetic construct
  misc_feature 1..48: note = Probe
  source 1..48: mol_type = other DNA
gagcatagctgccttccaagcagttgacccgggttcgattcccggcca

SEQ ID NO: 47988 - DNA, 49 bp, synthetic construct
  misc_feature 1..49: note = Probe
  source 1..49: mol_type = other DNA
gagcatagctgccttccaagcagttgacccgggttcgattcccggccaa

SEQ ID NO: 47989 - DNA, 50 bp, synthetic construct
  misc_feature 1..50: note = Probe
  source 1..50: mol_type = other DNA
gagcatagctgccttccaagcagttgacccgggttcgattcccggccaac

SEQ ID NO: 47990 - DNA, 50 bp, synthetic construct
  misc_feature 1..50: note = Probe
  source 1..50: mol_type = other DNA
gagcatgagactcttaatctcagggtcgtgggttcgagccccacgttggg

SEQ ID NO: 47991 - DNA, 28 bp, synthetic construct
  misc_feature 1..28: note = Probe
  source 1..28: mol_type = other DNA
gagcatgggactcttaatcccagggtcg

SEQ ID NO: 47992 - DNA, 30 bp, synthetic construct; identical to SEQ ID NO: 5654
  misc_feature 1..30: note = Probe
  source 1..30: mol_type = other DNA

SEQ ID NO: 47993 - DNA, 50 bp, synthetic construct
  misc_feature 1..50: note = Probe
  source 1..50: mol_type = other DNA
gagcatgggactcttaatcccagggtcgtgggttcgagccccacgttggg

SEQ ID NO: 47994 - DNA, 17 bp, synthetic construct
  misc_feature 1..17: note = Probe
  source 1..17: mol_type = other DNA
gagcccacccagggacg

SEQ ID NO: 47995 - DNA, 18 bp, synthetic construct
  misc_feature 1..18: note = Probe
  source 1..18: mol_type = other DNA
gagcccacccagggacgc

SEQ ID NO: 47996 - DNA, 19 bp, synthetic construct
  misc_feature 1..19: note = Probe
  source 1..19: mol_type = other DNA
gagcccacccagggacgcc

SEQ ID NO: 47997 - DNA, 16 bp, synthetic construct
  misc_feature 1..16: note = Probe
  source 1..16: mol_type = other DNA
gagccccagtggaacc

SEQ ID NO: 47998 - DNA, 18 bp, synthetic construct
  misc_feature 1..18: note = Probe
  source 1..18: mol_type = other DNA
gagccccagtggaaccac

SEQ ID NO: 47999 - DNA, 19 bp, synthetic construct
  misc_feature 1..19: note = Probe
  source 1..19: mol_type = other DNA
gagccccagtggaaccacg

SEQ ID NO: 48000 - DNA, 17 bp, synthetic construct
  misc_feature 1..17: note = Probe
  source 1..17: mol_type = other DNA
gagcccggtaatcgcat

SEQ ID NO: 48001 - DNA, 20 bp, synthetic construct
  misc_feature 1..20: note = Probe
  source 1..20: mol_type = other DNA
gagcccggtaatcgcataaa

SEQ ID NO: 48002 - DNA, 23 bp, synthetic construct
  misc_feature 1..23: note = Probe
  source 1..23: mol_type = other DNA
gagcccggtaatcgcataaaact

SEQ ID NO: 48003 - DNA, 27 bp, synthetic construct
  misc_feature 1..27: note = Probe
  source 1..27: mol_type = other DNA
gagcccggtaatcgcataaaacttaaa

SEQ ID NO: 48004 - DNA, 28 bp, synthetic construct
  misc_feature 1..28: note = Probe
  source 1..28: mol_type = other DNA
gagcccggtaatcgcataaaacttaaaa

SEQ ID NO: 48005 - DNA, 31 bp, synthetic construct; identical to SEQ ID NO: 961
  misc_feature 1..31: note = Probe
  source 1..31: mol_type = other DNA

SEQ ID NO: 48006 - DNA, 32 bp, synthetic construct; identical to SEQ ID NO: 5657
  misc_feature 1..32: note = Probe
  source 1..32: mol_type = other DNA

SEQ ID NO: 48007 - DNA, 33 bp, synthetic construct; identical to SEQ ID NO: 5658
  misc_feature 1..33: note = Probe
  source 1..33: mol_type = other DNA

SEQ ID NO: 48008 - DNA, 36 bp, synthetic construct; identical to SEQ ID NO: 31455
  misc_feature 1..36: note = Probe
  source 1..36: mol_type = other DNA

SEQ ID NO: 48009 - DNA, 37 bp, synthetic construct
  misc_feature 1..37: note = Probe
  source 1..37: mol_type = other DNA
gagcccggtaatcgcataaaacttaaaactttacagt

SEQ ID NO: 48010 - DNA, 46 bp, synthetic construct; identical to SEQ ID NO: 5661
  misc_feature 1..46: note = Probe
  source 1..46: mol_type = other DNA

SEQ ID NO: 48011 - DNA, 49 bp, synthetic construct; identical to SEQ ID NO: 5662
  misc_feature 1..49: note = Probe
  source 1..49: mol_type = other DNA

SEQ ID NO: 48012 - DNA, 25 bp, synthetic construct
  misc_feature 1..25: note = Probe
  source 1..25: mol_type = other DNA
gagcctcacctggagcaagaccctt

SEQ ID NO: 48013 - DNA, 50 bp, synthetic construct
  misc_feature 1..50: note = Probe
  source 1..50: mol_type = other DNA
gagcgttggtggtatagtggtaagcatagctgccttccaagcagttgacc

SEQ ID NO: 48014 - DNA, 16 bp, synthetic construct
  misc_feature 1..16: note = Probe
  source 1..16: mol_type = other DNA
gagcttaaaccccctt

SEQ ID NO: 48015 - DNA, 17 bp, synthetic construct
  misc_feature 1..17: note = Probe
  source 1..17: mol_type = other DNA
gagcttaaaccccctta

SEQ ID NO: 48016 - DNA, 21 bp, synthetic construct
  misc_feature 1..21: note = Probe
  source 1..21: mol_type = other DNA
gagcttaaacccccttatttc

SEQ ID NO: 48017 - DNA, 23 bp, synthetic construct
  misc_feature 1..23: note = Probe
  source 1..23: mol_type = other DNA
gagcttaaacccccttatttcta

SEQ ID NO: 48018 - DNA, 24 bp, synthetic construct
  misc_feature 1..24: note = Probe
  source 1..24: mol_type = other DNA
gagcttaaacccccttatttctag

SEQ ID NO: 48019 - DNA, 25 bp, synthetic construct
  misc_feature 1..25: note = Probe
  source 1..25: mol_type = other DNA
gagcttaaacccccttatttctagg

SEQ ID NO: 48020 - DNA, 26 bp, synthetic construct
  misc_feature 1..26: note = Probe
  source 1..26: mol_type = other DNA
gagcttaaacccccttatttctagga

SEQ ID NO: 48021 - DNA, 25 bp, synthetic construct
  misc_feature 1..25: note = Probe
  source 1..25: mol_type = other DNA
gaggccccgggttcgatccccggca

SEQ ID NO: 48022 - DNA, 31 bp, synthetic construct; identical to SEQ ID NO: 40106
  misc_feature 1..31: note = Probe
  source 1..31: mol_type = other DNA

SEQ ID NO: 48023 - DNA, 34 bp, synthetic construct; identical to SEQ ID NO: 20295
  misc_feature 1..34: note = Probe
  source 1..34: mol_type = other DNA

SEQ ID NO: 48024 - DNA, 28 bp, synthetic construct
  misc_feature 1..28: note = Probe
  source 1..28: mol_type = other DNA
gaggcgtgggttcgaatcccacttctga

SEQ ID NO: 48025 - DNA, 16 bp, synthetic construct
  misc_feature 1..16: note = Probe
  source 1..16: mol_type = other DNA
gaggcttacgacccct

SEQ ID NO: 48026 - DNA, 18 bp, synthetic construct
  misc_feature 1..18: note = Probe
  source 1..18: mol_type = other DNA
gaggcttacgacccctta

SEQ ID NO: 48027 - DNA, 24 bp, synthetic construct
  misc_feature 1..24: note = Probe
  source 1..24: mol_type = other DNA
gaggcttacgaccccttatttacc

SEQ ID NO: 48028 - DNA, 25 bp, synthetic construct
  misc_feature 1..25: note = Probe
  source 1..25: mol_type = other DNA
gaggcttacgaccccttatttaccg

SEQ ID NO: 48029 - DNA, 27 bp, synthetic construct
  misc_feature 1..27: note = Probe
  source 1..27: mol_type = other DNA
gaggcttacgaccccttatttaccgag

SEQ ID NO: 48030 - DNA, 30 bp, synthetic construct; identical to SEQ ID NO: 10159
  misc_feature 1..30: note = Probe
  source 1..30: mol_type = other DNA

SEQ ID NO: 48031 - DNA, 46 bp, synthetic construct; identical to SEQ ID NO: 40111
  misc_feature 1..46: note = Probe
  source 1..46: mol_type = other DNA

SEQ ID NO: 48032 - DNA, 50 bp, synthetic construct; identical to SEQ ID NO: 40112
  misc_feature 1..50: note = Probe
  source 1..50: mol_type = other DNA

SEQ ID NO: 48033 - DNA, 27 bp, synthetic construct
  misc_feature 1..27: note = Probe
  source 1..27: mol_type = other DNA
gaggtcccgggttcaaatcccggacga

SEQ ID NO: 48034 - DNA, 31 bp, synthetic construct
  misc_feature 1..31: note = Probe
  source 1..31: mol_type = other DNA
gaggtcccgggttcaaatcccggacgagccc

SEQ ID NO: 48035 - DNA, 31 bp, synthetic construct
  misc_feature 1..31: note = Probe
  source 1..31: mol_type = other DNA
gaggtcccgggttcgatccccagcatctcca

SEQ ID NO: 48036 - DNA, 29 bp, synthetic construct
  misc_feature 1..29: note = Probe
  source 1..29: mol_type = other DNA
gaggttgtgagttcgagcctcacctggag

SEQ ID NO: 48037 - DNA, 31 bp, synthetic construct; identical to SEQ ID NO: 5673
  misc_feature 1..31: note = Probe
  source 1..31: mol_type = other DNA

SEQ ID NO: 48038 - DNA, 33 bp, synthetic construct
  misc_feature 1..33: note = Probe
  source 1..33: mol_type = other DNA
gaggttgtgagttcgagcctcacctggagcatt

SEQ ID NO: 48039 - DNA, 34 bp, synthetic construct; identical to SEQ ID NO: 5674
  misc_feature 1..34: note = Probe
  source 1..34: mol_type = other DNA

SEQ ID NO: 48040 - DNA, 18 bp, synthetic construct
  misc_feature 1..18: note = Probe
  source 1..18: mol_type = other DNA
gagtaaataataggagct

SEQ ID NO: 48041 - DNA, 24 bp, synthetic construct
  misc_feature 1..24: note = Probe
  source 1..24: mol_type = other DNA
gagtaaataataggagcttaaacc

SEQ ID NO: 48042 - DNA, 25 bp, synthetic construct
  misc_feature 1..25: note = Probe
  source 1..25: mol_type = other DNA
gagtaaataataggagcttaaaccc

SEQ ID NO: 48043 - DNA, 31 bp, synthetic construct; identical to SEQ ID NO: 970
  misc_feature 1..31: note = Probe
  source 1..31: mol_type = other DNA

SEQ ID NO: 48044 - DNA, 32 bp, synthetic construct; identical to SEQ ID NO: 5679
  misc_feature 1..32: note = Probe
  source 1..32: mol_type = other DNA

SEQ ID NO: 48045 - DNA, 34 bp, synthetic construct; identical to SEQ ID NO: 20333
  misc_feature 1..34: note = Probe
  source 1..34: mol_type = other DNA

SEQ ID NO: 48046 - DNA, 37 bp, synthetic construct; identical to SEQ ID NO: 5680
  misc_feature 1..37: note = Probe
  source 1..37: mol_type = other DNA

SEQ ID NO: 48047 - DNA, 38 bp, synthetic construct; identical to SEQ ID NO: 5681
  misc_feature 1..38: note = Probe
  source 1..38: mol_type = other DNA

SEQ ID NO: 48048 - DNA, 39 bp, synthetic construct; identical to SEQ ID NO: 5682
  misc_feature 1..39: note = Probe
  source 1..39: mol_type = other DNA

SEQ ID NO: 48049 - DNA, 40 bp, synthetic construct; identical to SEQ ID NO: 5683
  misc_feature 1..40: note = Probe
  source 1..40: mol_type = other DNA

SEQ ID NO: 48050 - DNA, 43 bp, synthetic construct; identical to SEQ ID NO: 5684
  misc_feature 1..43: note = Probe
  source 1..43: mol_type = other DNA

SEQ ID NO: 48051 - DNA, 50 bp, synthetic construct; identical to SEQ ID NO: 5686
  misc_feature 1..50: note = Probe
  source 1..50: mol_type = other DNA

SEQ ID NO: 48052 - DNA, 19 bp, synthetic construct
  misc_feature 1..19: note = Probe
  source 1..19: mol_type = other DNA
gagtcccatctggggtggc

SEQ ID NO: 48053 - DNA, 19 bp, synthetic construct
  misc_feature 1..19: note = Probe
  source 1..19: mol_type = other DNA
gagtcccttcgtggtcgtc

SEQ ID NO: 48054 - DNA, 17 bp, synthetic construct
  misc_feature 1..17: note = Probe
  source 1..17: mol_type = other DNA
gagtgaagcattggact

SEQ ID NO: 48055 - DNA, 19 bp, synthetic construct
  misc_feature 1..19: note = Probe
  source 1..19: mol_type = other DNA
gagtgaagcattggactgt

SEQ ID NO: 48056 - DNA, 20 bp, synthetic construct
  misc_feature 1..20: note = Probe
  source 1..20: mol_type = other DNA
gagtgaagcattggactgta

SEQ ID NO: 48057 - DNA, 23 bp, synthetic construct
  misc_feature 1..23: note = Probe
  source 1..23: mol_type = other DNA
gagtgaagcattggactgtaaat

SEQ ID NO: 48058 - DNA, 25 bp, synthetic construct
  misc_feature 1..25: note = Probe
  source 1..25: mol_type = other DNA
gagtggggttttgcagtccttagct

SEQ ID NO: 48059 - DNA, 25 bp, synthetic construct
  misc_feature 1..25: note = Probe
  source 1..25: mol_type = other DNA
gagtgtagcttaacacaaagcaccc

SEQ ID NO: 48060 - DNA, 28 bp, synthetic construct
  misc_feature 1..28: note = Probe
  source 1..28: mol_type = other DNA
gagtgtagcttaacacaaagcacccaac

SEQ ID NO: 48061 - DNA, 29 bp, synthetic construct
  misc_feature 1..29: note = Probe
  source 1..29: mol_type = other DNA
gagtgtagcttaacacaaagcacccaact

SEQ ID NO: 48062 - DNA, 20 bp, synthetic construct
  misc_feature 1..20: note = Probe
  source 1..20: mol_type = other DNA
gagtgtcaggatggccgagt

SEQ ID NO: 48063 - DNA, 24 bp, synthetic construct
  misc_feature 1..24: note = Probe
  source 1..24: mol_type = other DNA
gagttaaagactttttctctgatt

SEQ ID NO: 48064 - DNA, 25 bp, synthetic construct
  misc_feature 1..25: note = Probe
  source 1..25: mol_type = other DNA
gagttaaagactttttctctgattt

SEQ ID NO: 48065 - DNA, 23 bp, synthetic construct
  misc_feature 1..23: note = Probe
  source 1..23: mol_type = other DNA
gagttcaaatctcggtggaacct

SEQ ID NO: 48066 - DNA, 26 bp, synthetic construct
  misc_feature 1..26: note = Probe
  source 1..26: mol_type = other DNA
gagttcaaatctcggtggaacctgca

SEQ ID NO: 48067 - DNA, 23 bp, synthetic construct
  misc_feature 1..23: note = Probe
  source 1..23: mol_type = other DNA
gagttcaaatctcggtgggacct

SEQ ID NO: 48068 - DNA, 26 bp, synthetic construct
  misc_feature 1..26: note = Probe
  source 1..26: mol_type = other DNA
gagttcaaatctcggtgggacctcac

SEQ ID NO: 48069 - DNA, 26 bp, synthetic construct
  misc_feature 1..26: note = Probe
  source 1..26: mol_type = other DNA
gagttcgaacctcagagggggcagct

SEQ ID NO: 48070 - DNA, 26 bp, synthetic construct
  misc_feature 1..26: note = Probe
  source 1..26: mol_type = other DNA
gagttcgagcctcacctggagcattg

SEQ ID NO: 48071 - DNA, 23 bp, synthetic construct
  misc_feature 1..23: note = Probe
  source 1..23: mol_type = other DNA
gagttcgatcctcacacggggca

SEQ ID NO: 48072 - DNA, 25 bp, synthetic construct
  misc_feature 1..25: note = Probe
  source 1..25: mol_type = other DNA
gagttcgatcctcacacggggcaca

SEQ ID NO: 48073 - DNA, 26 bp, synthetic construct
  misc_feature 1..26: note = Probe
  source 1..26: mol_type = other DNA
gagttcgatcctcacacggggcacaa

SEQ ID NO: 48074 - DNA, 50 bp, synthetic construct; identical to SEQ ID NO: 973
  misc_feature 1..50: note = Probe
  source 1..50: mol_type = other DNA

SEQ ID NO: 48075 - DNA, 20 bp, synthetic construct
  misc_feature 1..20: note = Probe
  source 1..20: mol_type = other DNA
gataacagctatccattggt

SEQ ID NO: 48076 - DNA, 22 bp, synthetic construct
  misc_feature 1..22: note = Probe
  source 1..22: mol_type = other DNA
gataacagctatccattggtct

SEQ ID NO: 48077 - DNA, 23 bp, synthetic construct
  misc_feature 1..23: note = Probe
  source 1..23: mol_type = other DNA
gataacagctatccattggtctt

SEQ ID NO: 48078 - DNA, 30 bp, synthetic construct; identical to SEQ ID NO: 31564
  misc_feature 1..30: note = Probe
  source 1..30: mol_type = other DNA

SEQ ID NO: 48079 - DNA, 32 bp, synthetic construct
  misc_feature 1..32: note = Probe
  source 1..32: mol_type = other DNA
gataacagctatccattggtcttaggccccaa

SEQ ID NO: 48080 - DNA, 21 bp, synthetic construct
  misc_feature 1..21: note = Probe
  source 1..21: mol_type = other DNA
gataatcatatttaccaaatg

SEQ ID NO: 48081 - DNA, 20 bp, synthetic construct
  misc_feature 1..20: note = Probe
  source 1..20: mol_type = other DNA
gatagagtaaataataggag

SEQ ID NO: 48082 - DNA, 28 bp, synthetic construct
  misc_feature 1..28: note = Probe
  source 1..28: mol_type = other DNA
gatagagtaaataataggagcttaaacc

SEQ ID NO: 48083 - DNA, 29 bp, synthetic construct
  misc_feature 1..29: note = Probe
  source 1..29: mol_type = other DNA
gatagagtaaataataggagcttaaaccc

SEQ ID NO: 48084 - DNA, 30 bp, synthetic construct; identical to SEQ ID NO: 31570
  misc_feature 1..30: note = Probe
  source 1..30: mol_type = other DNA

SEQ ID NO: 48085 - DNA, 33 bp, synthetic construct; identical to SEQ ID NO: 974
  misc_feature 1..33: note = Probe
  source 1..33: mol_type = other DNA

SEQ ID NO: 48086 - DNA, 34 bp, synthetic construct; identical to SEQ ID NO: 975
  misc_feature 1..34: note = Probe
  source 1..34: mol_type = other DNA

SEQ ID NO: 48087 - DNA, 35 bp, synthetic construct
  misc_feature 1..35: note = Probe
  source 1..35: mol_type = other DNA
gatagagtaaataataggagcttaaacccccttat

SEQ ID NO: 48088 - DNA, 36 bp, synthetic construct
  misc_feature 1..36: note = Probe
  source 1..36: mol_type = other DNA
gatagagtaaataataggagcttaaacccccttatt

SEQ ID NO: 48089 - DNA, 40 bp, synthetic construct; identical to SEQ ID NO: 976
  misc_feature 1..40: note = Probe
  source 1..40: mol_type = other DNA

SEQ ID NO: 48090 - DNA, 41 bp, synthetic construct; identical to SEQ ID NO: 5711
  misc_feature 1..41: note = Probe
  source 1..41: mol_type = other DNA

SEQ ID NO: 48091 - DNA, 42 bp, synthetic construct; identical to SEQ ID NO: 5712
  misc_feature 1..42: note = Probe
  source 1..42: mol_type = other DNA

SEQ ID NO: 48092 - DNA, 43 bp, synthetic construct; identical to SEQ ID NO: 5713
  misc_feature 1..43: note = Probe
  source 1..43: mol_type = other DNA

SEQ ID NO: 48093 - DNA, 44 bp, synthetic construct; identical to SEQ ID NO: 5714
  misc_feature 1..44: note = Probe
  source 1..44: mol_type = other DNA

SEQ ID NO: 48094 - DNA, 45 bp, synthetic construct; identical to SEQ ID NO: 5715
  misc_feature 1..45: note = Probe
  source 1..45: mol_type = other DNA

SEQ ID NO: 48095 - DNA, 46 bp, synthetic construct; identical to SEQ ID NO: 5716
  misc_feature 1..46: note = Probe
  source 1..46: mol_type = other DNA

SEQ ID NO: 48096 - DNA, 16 bp, synthetic construct
  misc_feature 1..16: note = Probe
  source 1..16: mol_type = other DNA
gataggtggcacggag

SEQ ID NO: 48097 - DNA, 25 bp, synthetic construct
  misc_feature 1..25: note = Probe
  source 1..25: mol_type = other DNA
gatatccaaccttcagctatagggt

SEQ ID NO: 48098 - DNA, 30 bp, synthetic construct; identical to SEQ ID NO: 20401
  misc_feature 1..30: note = Probe
  source 1..30: mol_type = other DNA

SEQ ID NO: 48099 - DNA, 17 bp, synthetic construct
  misc_feature 1..17: note = Probe
  source 1..17: mol_type = other DNA
gatccccagcatctcca

SEQ ID NO: 48100 - DNA, 24 bp, synthetic construct
  misc_feature 1..24: note = Probe
  source 1..24: mol_type = other DNA
gatccccagcatctccagtgtttt

SEQ ID NO: 48101 - DNA, 17 bp, synthetic construct
  misc_feature 1..17: note = Probe
  source 1..17: mol_type = other DNA
gatccccggcatctcca

SEQ ID NO: 48102 - DNA, 19 bp, synthetic construct
  misc_feature 1..19: note = Probe
  source 1..19: mol_type = other DNA
gatccccggcatctccatt

SEQ ID NO: 48103 - DNA, 20 bp, synthetic construct
  misc_feature 1..20: note = Probe
  source 1..20: mol_type = other DNA
gatccccggcatctccattg

SEQ ID NO: 48104 - DNA, 20 bp, synthetic construct
  misc_feature 1..20: note = Probe
  source 1..20: mol_type = other DNA
gatccccgtacgggccacga

SEQ ID NO: 48105 - DNA, 20 bp, synthetic construct
  misc_feature 1..20: note = Probe
  source 1..20: mol_type = other DNA
gatcccgggtttcggcactt

SEQ ID NO: 48106 - DNA, 29 bp, synthetic construct
  misc_feature 1..29: note = Probe
  source 1..29: mol_type = other DNA
gatccgagttcaaatctcggtggaacctg

SEQ ID NO: 48107 - DNA, 29 bp, synthetic construct
  misc_feature 1..29: note = Probe
  source 1..29: mol_type = other DNA
gatccgagttcaaatctcggtggaacctt

SEQ ID NO: 48108 - DNA, 28 bp, synthetic construct
  misc_feature 1..28: note = Probe
  source 1..28: mol_type = other DNA
gatccgagttcaaatctcggtgggacct

SEQ ID NO: 48109 - DNA, 31 bp, synthetic construct; identical to SEQ ID NO: 5720
  misc_feature 1..31: note = Probe
  source 1..31: mol_type = other DNA

SEQ ID NO: 48110 - DNA, 29 bp, synthetic construct
  misc_feature 1..29: note = Probe
  source 1..29: mol_type = other DNA
gatcctgggttcgaatcccagcggggcct

SEQ ID NO: 48111 - DNA, 32 bp, synthetic construct
  misc_feature 1..32: note = Probe
  source 1..32: mol_type = other DNA
gatcctgggttcgaatcccagcggggccttac

SEQ ID NO: 48112 - DNA, 26 bp, synthetic construct
  misc_feature 1..26: note = Probe
  source 1..26: mol_type = other DNA
gatcctgggttcgaatcccagcggtg

SEQ ID NO: 48113 - DNA, 27 bp, synthetic construct
  misc_feature 1..27: note = Probe
  source 1..27: mol_type = other DNA
gatcctgggttcgaatcccagcggtgc

SEQ ID NO: 48114 - DNA, 29 bp, synthetic construct
  misc_feature 1..29: note = Probe
  source 1..29: mol_type = other DNA
gatcctgggttcgaatcccagcggtgcct

SEQ ID NO: 48115 - DNA, 30 bp, synthetic construct
  misc_feature 1..30: note = Probe
  source 1..30: mol_type = other DNA
gatcctgggttcgaatcccagcggtgcctc

SEQ ID NO: 48116 - DNA, 32 bp, synthetic construct
  misc_feature 1..32: note = Probe
  source 1..32: mol_type = other DNA
gatcctgggttcgaatcccagcggtgcctcaa

SEQ ID NO: 48117 - DNA, 32 bp, synthetic construct; identical to SEQ ID NO: 5721
  misc_feature 1..32: note = Probe
  source 1..32: mol_type = other DNA

SEQ ID NO: 48118 - DNA, 20 bp, synthetic construct
  misc_feature 1..20: note = Probe
  source 1..20: mol_type = other DNA
gatcgaaaccatcctctgct

SEQ ID NO: 48119 - DNA, 24 bp, synthetic construct
  misc_feature 1..24: note = Probe
  source 1..24: mol_type = other DNA
gatcgaaaccatcctctgctaggt

SEQ ID NO: 48120 - DNA, 23 bp, synthetic construct
  misc_feature 1..23: note = Probe
  source 1..23: mol_type = other DNA
gatcgaaaccatcctctgctatc

SEQ ID NO: 48121 - DNA, 20 bp, synthetic construct
  misc_feature 1..20: note = Probe
  source 1..20: mol_type = other DNA
gatcgatgcccgcatcctcc

SEQ ID NO: 48122 - DNA, 22 bp, synthetic construct
  misc_feature 1..22: note = Probe
  source 1..22: mol_type = other DNA
gatcgatgcccgcatcctccac

SEQ ID NO: 48123 - DNA, 23 bp, synthetic construct
  misc_feature 1..23: note = Probe
  source 1..23: mol_type = other DNA
gatcgatgcccgcatcctccact

SEQ ID NO: 48124 - DNA, 24 bp, synthetic construct
  misc_feature 1..24: note = Probe
  source 1..24: mol_type = other DNA
gatcgatgcccgcatcctccactc

SEQ ID NO: 48125 - DNA, 24 bp, synthetic construct
  misc_feature 1..24: note = Probe
  source 1..24: mol_type = other DNA
gatcgatgcccgcattctccatac

SEQ ID NO: 48126 - DNA, 26 bp, synthetic construct
  misc_feature 1..26: note = Probe
  source 1..26: mol_type = other DNA
gatgaaaacctttttccaaggacaaa

SEQ ID NO: 48127 - DNA, 27 bp, synthetic construct
  misc_feature 1..27: note = Probe
  source 1..27: mol_type = other DNA
gatgaaaacctttttccaaggacaaat

SEQ ID NO: 48128 - DNA, 16 bp, synthetic construct
  misc_feature 1..16: note = Probe
  source 1..16: mol_type = other DNA
gatgcagagtggggtt

SEQ ID NO: 48129 - DNA, 18 bp, synthetic construct
  misc_feature 1..18: note = Probe
  source 1..18: mol_type = other DNA
gatgcagagtggggtttt

SEQ ID NO: 48130 - DNA, 19 bp, synthetic construct
  misc_feature 1..19: note = Probe
  source 1..19: mol_type = other DNA
gatgcagagtggggttttg

SEQ ID NO: 48131 - DNA, 23 bp, synthetic construct
  misc_feature 1..23: note = Probe
  source 1..23: mol_type = other DNA
gatgcagagtggggttttgcagt

SEQ ID NO: 48132 - DNA, 25 bp, synthetic construct
  misc_feature 1..25: note = Probe
  source 1..25: mol_type = other DNA
gatgcagagtggggttttgcagtcc

SEQ ID NO: 48133 - DNA, 26 bp, synthetic construct
  misc_feature 1..26: note = Probe
  source 1..26: mol_type = other DNA
gatgcagagtggggttttgcagtcct

SEQ ID NO: 48134 - DNA, 28 bp, synthetic construct
  misc_feature 1..28: note = Probe
  source 1..28: mol_type = other DNA
gatgcagagtggggttttgcagtcctta

SEQ ID NO: 48135 - DNA, 29 bp, synthetic construct
  misc_feature 1..29: note = Probe
  source 1..29: mol_type = other DNA
gatgcagagtggggttttgcagtccttag

SEQ ID NO: 48136 - DNA, 30 bp, synthetic construct; identical to SEQ ID NO: 5730
  misc_feature 1..30: note = Probe
  source 1..30: mol_type = other DNA

SEQ ID NO: 48137 - DNA, 31 bp, synthetic construct; identical to SEQ ID NO: 5731
  misc_feature 1..31: note = Probe
  source 1..31: mol_type = other DNA

SEQ ID NO: 48138 - DNA, 17 bp, synthetic construct
  misc_feature 1..17: note = Probe
  source 1..17: mol_type = other DNA
gatgcccgcatcctcca

SEQ ID NO: 48139 - DNA, 25 bp, synthetic construct
  misc_feature 1..25: note = Probe
  source 1..25: mol_type = other DNA
gatggggtgtgataggtggcacgga

SEQ ID NO: 48140 - DNA, 27 bp, synthetic construct
  misc_feature 1..27: note = Probe
  source 1..27: mol_type = other DNA
gatggggtgtgataggtggcacggaga

SEQ ID NO: 48141 - DNA, 28 bp, synthetic construct
  misc_feature 1..28: note = Probe
  source 1..28: mol_type = other DNA
gatgggttcgattctcatagtcctagaa

SEQ ID NO: 48142 - DNA, 31 bp, synthetic construct; identical to SEQ ID NO: 5736
  misc_feature 1..31: note = Probe
  source 1..31: mol_type = other DNA

SEQ ID NO: 48143 - DNA, 33 bp, synthetic construct; identical to SEQ ID NO: 5738
  misc_feature 1..33: note = Probe
  source 1..33: mol_type = other DNA

SEQ ID NO: 48144 - DNA, 34 bp, synthetic construct; identical to SEQ ID NO: 5739
  misc_feature 1..34: note = Probe
  source 1..34: mol_type = other DNA

SEQ ID NO: 48145 - DNA, 25 bp, synthetic construct
  misc_feature 1..25: note = Probe
  source 1..25: mol_type = other DNA
gattagggtgcttagctgttaacta

SEQ ID NO: 48146 - DNA, 50 bp, synthetic construct; identical to SEQ ID NO: 977
  misc_feature 1..50: note = Probe
  source 1..50: mol_type = other DNA

SEQ ID NO: 48147 - DNA, 27 bp, synthetic construct
  misc_feature 1..27: note = Probe
  source 1..27: mol_type = other DNA
gattccaggttcgactcctggctggct

SEQ ID NO: 48148 - DNA, 46 bp, synthetic construct; identical to SEQ ID NO: 20434
  misc_feature 1..46: note = Probe
  source 1..46: mol_type = other DNA

SEQ ID NO: 48149 - DNA, 18 bp, synthetic construct
  misc_feature 1..18: note = Probe
  source 1..18: mol_type = other DNA
gattccccgacggggaga

SEQ ID NO: 48150 - DNA, 18 bp, synthetic construct
  misc_feature 1..18: note = Probe
  source 1..18: mol_type = other DNA
gattccccgacggggagg

SEQ ID NO: 48151 - DNA, 20 bp, synthetic construct
  misc_feature 1..20: note = Probe
  source 1..20: mol_type = other DNA
gattccccgacggggaggca

SEQ ID NO: 48152 - DNA, 20 bp, synthetic construct
  misc_feature 1..20: note = Probe
  source 1..20: mol_type = other DNA
gattcccgggcggcgcactt

SEQ ID NO: 48153 - DNA, 18 bp, synthetic construct
  misc_feature 1..18: note = Probe
  source 1..18: mol_type = other DNA
gattctcatagtcctaga

SEQ ID NO: 48154 - DNA, 16 bp, synthetic construct
  misc_feature 1..16: note = Probe
  source 1..16: mol_type = other DNA
gattgtgaatctgaca

SEQ ID NO: 48155 - DNA, 18 bp, synthetic construct
  misc_feature 1..18: note = Probe
  source 1..18: mol_type = other DNA
gattgtgaatctgacaac

SEQ ID NO: 48156 - DNA, 19 bp, synthetic construct
  misc_feature 1..19: note = Probe
  source 1..19: mol_type = other DNA
gattgtgaatctgacaaca

SEQ ID NO: 48157 - DNA, 21 bp, synthetic construct
  misc_feature 1..21: note = Probe
  source 1..21: mol_type = other DNA
gattgtgaatctgacaacaga

SEQ ID NO: 48158 - DNA, 22 bp, synthetic construct
  misc_feature 1..22: note = Probe
  source 1..22: mol_type = other DNA
gattgtgaatctgacaacagag

SEQ ID NO: 48159 - DNA, 24 bp, synthetic construct
  misc_feature 1..24: note = Probe
  source 1..24: mol_type = other DNA
gattgtgaatctgacaacagaggc

SEQ ID NO: 48160 - DNA, 25 bp, synthetic construct
  misc_feature 1..25: note = Probe
  source 1..25: mol_type = other DNA
gattgtgaatctgacaacagaggct

SEQ ID NO: 48161 - DNA, 31 bp, synthetic construct
  misc_feature 1..31: note = Probe
  source 1..31: mol_type = other DNA
gattgtgaatctgacaacagaggcttacgac

SEQ ID NO: 48162 - DNA, 35 bp, synthetic construct; identical to SEQ ID NO: 5752
  misc_feature 1..35: note = Probe
  source 1..35: mol_type = other DNA

SEQ ID NO: 48163 - DNA, 36 bp, synthetic construct; identical to SEQ ID NO: 5753
  misc_feature 1..36: note = Probe
  source 1..36: mol_type = other DNA

SEQ ID NO: 48164 - DNA, 38 bp, synthetic construct; identical to SEQ ID NO: 985
  misc_feature 1..38: note = Probe
  source 1..38: mol_type = other DNA

SEQ ID NO: 48165 - DNA, 40 bp, synthetic construct; identical to SEQ ID NO: 20460
  misc_feature 1..40: note = Probe
  source 1..40: mol_type = other DNA

SEQ ID NO: 48166 - DNA, 44 bp, synthetic construct; identical to SEQ ID NO: 5755
  misc_feature 1..44: note = Probe
  source 1..44: mol_type = other DNA

SEQ ID NO: 48167 - DNA, 45 bp, synthetic construct; identical to SEQ ID NO: 5756
  misc_feature 1..45: note = Probe
  source 1..45: mol_type = other DNA

SEQ ID NO: 48168 - DNA, 46 bp, synthetic construct; identical to SEQ ID NO: 5757
  misc_feature 1..46: note = Probe
  source 1..46: mol_type = other DNA

SEQ ID NO: 48169 - DNA, 48 bp, synthetic construct
  misc_feature 1..48: note = Probe
  source 1..48: mol_type = other DNA
gattgtgaatctgacaacagaggcttacgaccccttatttaccgagaa

SEQ ID NO: 48170 - DNA, 49 bp, synthetic construct
  misc_feature 1..49: note = Probe
  source 1..49: mol_type = other DNA
gattgtgaatctgacaacagaggcttacgaccccttatttaccgagaaa

SEQ ID NO: 48171 - DNA, 50 bp, synthetic construct; identical to SEQ ID NO: 5758
  misc_feature 1..50: note = Probe
  source 1..50: mol_type = other DNA

SEQ ID NO: 48172 - DNA, 27 bp, synthetic construct
  misc_feature 1..27: note = Probe
  source 1..27: mol_type = other DNA
gattgtgggttcgagtcccatctgggg

SEQ ID NO: 48173 - DNA, 20 bp, synthetic construct
  misc_feature 1..20: note = Probe
  source 1..20: mol_type = other DNA
gatttcaacttaacttgacc

SEQ ID NO: 48174 - DNA, 23 bp, synthetic construct
  misc_feature 1..23: note = Probe
  source 1..23: mol_type = other DNA
gatttcaacttaacttgaccgct

SEQ ID NO: 48175 - DNA, 24 bp, synthetic construct
  misc_feature 1..24: note = Probe
  source 1..24: mol_type = other DNA
gatttcaacttaacttgaccgctc

SEQ ID NO: 48176 - DNA, 25 bp, synthetic construct
  misc_feature 1..25: note = Probe
  source 1..25: mol_type = other DNA
gatttcaacttaacttgaccgctct

SEQ ID NO: 48177 - DNA, 27 bp, synthetic construct
  misc_feature 1..27: note = Probe
  source 1..27: mol_type = other DNA
gatttcaacttaacttgaccgctctga

SEQ ID NO: 48178 - DNA, 28 bp, synthetic construct
  misc_feature 1..28: note = Probe
  source 1..28: mol_type = other DNA
gatttcaacttaacttgaccgctctgag

SEQ ID NO: 48179 - DNA, 29 bp, synthetic construct
  misc_feature 1..29: note = Probe
  source 1..29: mol_type = other DNA
gatttcaacttaacttgaccgctctgagc

SEQ ID NO: 48180 - DNA, 30 bp, synthetic construct; identical to SEQ ID NO: 5769
  misc_feature 1..30: note = Probe
  source 1..30: mol_type = other DNA

SEQ ID NO: 48181 - DNA, 25 bp, synthetic construct
  misc_feature 1..25: note = Probe
  source 1..25: mol_type = other DNA
gatttcgactcattaaattatgata

SEQ ID NO: 48182 - DNA, 31 bp, synthetic construct; identical to SEQ ID NO: 5771
  misc_feature 1..31: note = Probe
  source 1..31: mol_type = other DNA

SEQ ID NO: 48183 - DNA, 37 bp, synthetic construct
  misc_feature 1..37: note = Probe
  source 1..37: mol_type = other DNA
gatttcgactcattaaattatgataatcatatttacc

SEQ ID NO: 48184 - DNA, 40 bp, synthetic construct; identical to SEQ ID NO: 5773
  misc_feature 1..40: note = Probe
  source 1..40: mol_type = other DNA

SEQ ID NO: 48185 - DNA, 42 bp, synthetic construct; identical to SEQ ID NO: 5774
  misc_feature 1..42: note = Probe
  source 1..42: mol_type = other DNA

SEQ ID NO: 48186 - DNA, 46 bp, synthetic construct
  misc_feature 1..46: note = Probe
  source 1..46: mol_type = other DNA
gatttgcgttcagttgatgcagagtggggttttgcagtccttagct

SEQ ID NO: 48187 - DNA, 20 bp, synthetic construct
  misc_feature 1..20: note = Probe
  source 1..20: mol_type = other DNA
gattttcatattgaattgca

SEQ ID NO: 48188 - DNA, 50 bp, synthetic construct
  misc_feature 1..50: note = Probe
  source 1..50: mol_type = other DNA
gattttcatattgaattgcaaattcgaagaagcagcttcaaacctgccgg

SEQ ID NO: 48189 - DNA, 27 bp, synthetic construct
  misc_feature 1..27: note = Probe
  source 1..27: mol_type = other DNA
gcaaattcgaagaagcagcttcaaacc

SEQ ID NO: 48190 - DNA, 35 bp, synthetic construct
  misc_feature 1..35: note = Probe
  source 1..35: mol_type = other DNA
gcaaattcgaagaagcagcttcaaacctgccgggg

SEQ ID NO: 48191 - DNA, 36 bp, synthetic construct; identical to SEQ ID NO: 31656
  misc_feature 1..36: note = Probe
  source 1..36: mol_type = other DNA

SEQ ID NO: 48192 - DNA, 37 bp, synthetic construct; identical to SEQ ID NO: 5780
  misc_feature 1..37: note = Probe
  source 1..37: mol_type = other DNA

SEQ ID NO: 48193 - DNA, 39 bp, synthetic construct; identical to SEQ ID NO: 5781
  misc_feature 1..39: note = Probe
  source 1..39: mol_type = other DNA

SEQ ID NO: 48194 - DNA, 40 bp, synthetic construct; identical to SEQ ID NO: 5782
  misc_feature 1..40: note = Probe
  source 1..40: mol_type = other DNA

SEQ ID NO: 48195 - DNA, 41 bp, synthetic construct; identical to SEQ ID NO: 5783
  misc_feature 1..41: note = Probe
  source 1..41: mol_type = other DNA

SEQ ID NO: 48196 - DNA, 28 bp, synthetic construct
  misc_feature 1..28: note = Probe
  source 1..28: mol_type = other DNA
gcaacctcggttcgaatccgagtcacgg

SEQ ID NO: 48197 - DNA, 30 bp, synthetic construct
  misc_feature 1..30: note = Probe
  source 1..30: mol_type = other DNA
gcaacctcggttcgaatccgagtcacggca

SEQ ID NO: 48198 - DNA, 32 bp, synthetic construct; identical to SEQ ID NO: 5784
  misc_feature 1..32: note = Probe
  source 1..32: mol_type = other DNA

SEQ ID NO: 48199 - DNA, 32 bp, synthetic construct; identical to SEQ ID NO: 5785
  misc_feature 1..32: note = Probe
  source 1..32: mol_type = other DNA

SEQ ID NO: 48200 - DNA, 33 bp, synthetic construct; identical to SEQ ID NO: 5786
  misc_feature 1..33: note = Probe
  source 1..33: mol_type = other DNA

SEQ ID NO: 48201 - DNA, 32 bp, synthetic construct; identical to SEQ ID NO: 5787
  misc_feature 1..32: note = Probe
  source 1..32: mol_type = other DNA

SEQ ID NO: 48202 - DNA, 33 bp, synthetic construct; identical to SEQ ID NO: 5788
  misc_feature 1..33: note = Probe
  source 1..33: mol_type = other DNA

SEQ ID NO: 48203 - DNA, 49 bp, synthetic construct; identical to SEQ ID NO: 5792
  misc_feature 1..49: note = Probe
  source 1..49: mol_type = other DNA

SEQ ID NO: 48204 - DNA, 50 bp, synthetic construct; identical to SEQ ID NO: 5793
  misc_feature 1..50: note = Probe
  source 1..50: mol_type = other DNA

SEQ ID NO: 48205 - DNA, 27 bp, synthetic construct
  misc_feature 1..27: note = Probe
  source 1..27: mol_type = other DNA
gcaatggtggttcagtggtagaattct

SEQ ID NO: 48206 - DNA, 31 bp, synthetic construct; identical to SEQ ID NO: 5794
  misc_feature 1..31: note = Probe
  source 1..31: mol_type = other DNA

SEQ ID NO: 48207 - DNA, 32 bp, synthetic construct; identical to SEQ ID NO: 5795
  misc_feature 1..32: note = Probe
  source 1..32: mol_type = other DNA

SEQ ID NO: 48208 - DNA, 22 bp, synthetic construct
  misc_feature 1..22: note = Probe
  source 1..22: mol_type = other DNA
gcacactactataaccacccta

SEQ ID NO: 48209 - DNA, 25 bp, synthetic construct
  misc_feature 1..25: note = Probe
  source 1..25: mol_type = other DNA
gcacaggttcgaatcctgttcgtga

SEQ ID NO: 48210 - DNA, 27 bp, synthetic construct
  misc_feature 1..27: note = Probe
  source 1..27: mol_type = other DNA
gcacaggttcgaatcctgttcgtgacg

SEQ ID NO: 48211 - DNA, 16 bp, synthetic construct
  misc_feature 1..16: note = Probe
  source 1..16: mol_type = other DNA
gcacccaacttacact

SEQ ID NO: 48212 - DNA, 17 bp, synthetic construct
  misc_feature 1..17: note = Probe
  source 1..17: mol_type = other DNA
gcacccaacttacactt

SEQ ID NO: 48213 - DNA, 18 bp, synthetic construct
  misc_feature 1..18: note = Probe
  source 1..18: mol_type = other DNA
gcacccaacttacactta

SEQ ID NO: 48214 - DNA, 19 bp, synthetic construct
  misc_feature 1..19: note = Probe
  source 1..19: mol_type = other DNA
gcacccaacttacacttag

SEQ ID NO: 48215 - DNA, 20 bp, synthetic construct
  misc_feature 1..20: note = Probe
  source 1..20: mol_type = other DNA
gcacccaacttacacttagg

SEQ ID NO: 48216 - DNA, 21 bp, synthetic construct
  misc_feature 1..21: note = Probe
  source 1..21: mol_type = other DNA
gcacccaacttacacttagga

SEQ ID NO: 48217 - DNA, 22 bp, synthetic construct
  misc_feature 1..22: note = Probe
  source 1..22: mol_type = other DNA
gcacccaacttacacttaggag

SEQ ID NO: 48218 - DNA, 23 bp, synthetic construct
  misc_feature 1..23: note = Probe
  source 1..23: mol_type = other DNA
gcacccaacttacacttaggaga

SEQ ID NO: 48219 - DNA, 24 bp, synthetic construct
  misc_feature 1..24: note = Probe
  source 1..24: mol_type = other DNA
gcacccaacttacacttaggagat

SEQ ID NO: 48220 - DNA, 25 bp, synthetic construct
  misc_feature 1..25: note = Probe
  source 1..25: mol_type = other DNA
gcacccaacttacacttaggagatt

SEQ ID NO: 48221 - DNA, 26 bp, synthetic construct
  misc_feature 1..26: note = Probe
  source 1..26: mol_type = other DNA
gcacccaacttacacttaggagattt

SEQ ID NO: 48222 - DNA, 27 bp, synthetic construct
  misc_feature 1..27: note = Probe
  source 1..27: mol_type = other DNA
gcacccaacttacacttaggagatttc

SEQ ID NO: 48223 - DNA, 28 bp, synthetic construct
  misc_feature 1..28: note = Probe
  source 1..28: mol_type = other DNA
gcacccaacttacacttaggagatttca

SEQ ID NO: 48224 - DNA, 29 bp, synthetic construct
  misc_feature 1..29: note = Probe
  source 1..29: mol_type = other DNA
gcacccaacttacacttaggagatttcaa

SEQ ID NO: 48225 - DNA, 30 bp, synthetic construct; identical to SEQ ID NO: 5807
  misc_feature 1..30: note = Probe
  source 1..30: mol_type = other DNA

SEQ ID NO: 48226 - DNA, 31 bp, synthetic construct; identical to SEQ ID NO: 5808
  misc_feature 1..31: note = Probe
  source 1..31: mol_type = other DNA

SEQ ID NO: 48227 - DNA, 32 bp, synthetic construct; identical to SEQ ID NO: 5809
  misc_feature 1..32: note = Probe
  source 1..32: mol_type = other DNA

SEQ ID NO: 48228 - DNA, 33 bp, synthetic construct; identical to SEQ ID NO: 5810
  misc_feature 1..33: note = Probe
  source 1..33: mol_type = other DNA

SEQ ID NO: 48229 - DNA, 36 bp, synthetic construct; identical to SEQ ID NO: 20519
  misc_feature 1..36: note = Probe
  source 1..36: mol_type = other DNA

SEQ ID NO: 48230 - DNA, 37 bp, synthetic construct; identical to SEQ ID NO: 5812
  misc_feature 1..37: note = Probe
  source 1..37: mol_type = other DNA

SEQ ID NO: 48231 - DNA, 38 bp, synthetic construct
  misc_feature 1..38: note = Probe
  source 1..38: mol_type = other DNA
gcacccaacttacacttaggagatttcaacttaacttg

SEQ ID NO: 48232 - DNA, 39 bp, synthetic construct
  misc_feature 1..39: note = Probe
  source 1..39: mol_type = other DNA
gcacccaacttacacttaggagatttcaacttaacttga

SEQ ID NO: 48233 - DNA, 40 bp, synthetic construct; identical to SEQ ID NO: 20520
  misc_feature 1..40: note = Probe
  source 1..40: mol_type = other DNA

SEQ ID NO: 48234 - DNA, 41 bp, synthetic construct
  misc_feature 1..41: note = Probe
  source 1..41: mol_type = other DNA
gcacccaacttacacttaggagatttcaacttaacttgacc

SEQ ID NO: 48235 - DNA, 42 bp, synthetic construct; identical to SEQ ID NO: 5813
  misc_feature 1..42: note = Probe
  source 1..42: mol_type = other DNA

SEQ ID NO: 48236 - DNA, 43 bp, synthetic construct; identical to SEQ ID NO: 5814
  misc_feature 1..43: note = Probe
  source 1..43: mol_type = other DNA

SEQ ID NO: 48237 - DNA, 44 bp, synthetic construct; identical to SEQ ID NO: 5815
  misc_feature 1..44: note = Probe
  source 1..44: mol_type = other DNA

SEQ ID NO: 48238 - DNA, 45 bp, synthetic construct; identical to SEQ ID NO: 5816
  misc_feature 1..45: note = Probe
  source 1..45: mol_type = other DNA

SEQ ID NO: 48239 - DNA, 46 bp, synthetic construct; identical to SEQ ID NO: 5817
  misc_feature 1..46: note = Probe
  source 1..46: mol_type = other DNA

SEQ ID NO: 48240 - DNA, 49 bp, synthetic construct; identical to SEQ ID NO: 5819
  misc_feature 1..49: note = Probe
  source 1..49: mol_type = other DNA

SEQ ID NO: 48241 - DNA, 50 bp, synthetic construct; identical to SEQ ID NO: 5820
  misc_feature 1..50: note = Probe
  source 1..50: mol_type = other DNA

SEQ ID NO: 48242 - DNA, 18 bp, synthetic construct
  misc_feature 1..18: note = Probe
  source 1..18: mol_type = other DNA
gcacgaggccccgggttc

SEQ ID NO: 48243 - DNA, 35 bp, synthetic construct; identical to SEQ ID NO: 13433
  misc_feature 1..35: note = Probe
  source 1..35: mol_type = other DNA

SEQ ID NO: 48244 - DNA, 37 bp, synthetic construct; identical to SEQ ID NO: 20530
  misc_feature 1..37: note = Probe
  source 1..37: mol_type = other DNA

SEQ ID NO: 48245 - DNA, 38 bp, synthetic construct; identical to SEQ ID NO: 5821
  misc_feature 1..38: note = Probe
  source 1..38: mol_type = other DNA

SEQ ID NO: 48246 - DNA, 38 bp, synthetic construct; identical to SEQ ID NO: 20534
  misc_feature 1..38: note = Probe
  source 1..38: mol_type = other DNA

SEQ ID NO: 48247 - DNA, 38 bp, synthetic construct; identical to SEQ ID NO: 20539
  misc_feature 1..38: note = Probe
  source 1..38: mol_type = other DNA

SEQ ID NO: 48248 - DNA, 28 bp, synthetic construct
  misc_feature 1..28: note = Probe
  source 1..28: mol_type = other DNA
gcacgcgtgggttcgaatcccatcctcg

SEQ ID NO: 48249 - DNA, 29 bp, synthetic construct
  misc_feature 1..29: note = Probe
  source 1..29: mol_type = other DNA
gcacgcgtgggttcgaatcccatcctcgt

SEQ ID NO: 48250 - DNA, 30 bp, synthetic construct
  misc_feature 1..30: note = Probe
  source 1..30: mol_type = other DNA
gcacgcgtgggttcgaatcccatcctcgtc

SEQ ID NO: 48251 - DNA, 31 bp, synthetic construct
  misc_feature 1..31: note = Probe
  source 1..31: mol_type = other DNA
gcacgcgtgggttcgaatcccatcctcgtcg

SEQ ID NO: 48252 - DNA, 28 bp, synthetic construct
  misc_feature 1..28: note = Probe
  source 1..28: mol_type = other DNA
gcacggagaattttggattctcagggat

SEQ ID NO: 48253 - DNA, 29 bp, synthetic construct
  misc_feature 1..29: note = Probe
  source 1..29: mol_type = other DNA
gcacggagaattttggattctcagggatg

SEQ ID NO: 48254 - DNA, 35 bp, synthetic construct
  misc_feature 1..35: note = Probe
  source 1..35: mol_type = other DNA
gcacggagaattttggattctcagggatgggttcg

SEQ ID NO: 48255 - DNA, 50 bp, synthetic construct
  misc_feature 1..50: note = Probe
  source 1..50: mol_type = other DNA
gcacggagaattttggattctcagggatgggttcgattctcatagtccta

SEQ ID NO: 48256 - DNA, 41 bp, synthetic construct
  misc_feature 1..41: note = Probe
  source 1..41: mol_type = other DNA
gcacgtatgaggccccgggttcaatccccggcatctccaga

SEQ ID NO: 48257 - DNA, 42 bp, synthetic construct; identical to SEQ ID NO: 20546
  misc_feature 1..42: note = Probe
  source 1..42: mol_type = other DNA

SEQ ID NO: 48258 - DNA, 28 bp, synthetic construct
  misc_feature 1..28: note = Probe
  source 1..28: mol_type = other DNA
gcactctggactctgaatccagcgatcc

SEQ ID NO: 48259 - DNA, 30 bp, synthetic construct; identical to SEQ ID NO: 990
  misc_feature 1..30: note = Probe
  source 1..30: mol_type = other DNA

SEQ ID NO: 48260 - DNA, 31 bp, synthetic construct; identical to SEQ ID NO: 5824
  misc_feature 1..31: note = Probe
  source 1..31: mol_type = other DNA

SEQ ID NO: 48261 - DNA, 28 bp, synthetic construct
  misc_feature 1..28: note = Probe
  source 1..28: mol_type = other DNA
gcactctggactttgaatccagcgatcc

SEQ ID NO: 48262 - DNA, 31 bp, synthetic construct; identical to SEQ ID NO: 20555
  misc_feature 1..31: note = Probe
  source 1..31: mol_type = other DNA

SEQ ID NO: 48263 - DNA, 29 bp, synthetic construct
  misc_feature 1..29: note = Probe
  source 1..29: mol_type = other DNA
gcactggtggttcagtggtagaattctcg

SEQ ID NO: 48264 - DNA, 30 bp, synthetic construct; identical to SEQ ID NO: 8615
  misc_feature 1..30: note = Probe
  source 1..30: mol_type = other DNA

SEQ ID NO: 48265 - DNA, 33 bp, synthetic construct; identical to SEQ ID NO: 5828
  misc_feature 1..33: note = Probe
  source 1..33: mol_type = other DNA

SEQ ID NO: 48266 - DNA, 34 bp, synthetic construct; identical to SEQ ID NO: 5829
  misc_feature 1..34: note = Probe
  source 1..34: mol_type = other DNA

SEQ ID NO: 48267 - DNA, 35 bp, synthetic construct; identical to SEQ ID NO: 20565
  misc_feature 1..35: note = Probe
  source 1..35: mol_type = other DNA

SEQ ID NO: 48268 - DNA, 33 bp, synthetic construct; identical to SEQ ID NO: 13439
  misc_feature 1..33: note = Probe
  source 1..33: mol_type = other DNA

SEQ ID NO: 48269 - DNA, 34 bp, synthetic construct; identical to SEQ ID NO: 13440
  misc_feature 1..34: note = Probe
  source 1..34: mol_type = other DNA

SEQ ID NO: 48270 - DNA, 36 bp, synthetic construct; identical to SEQ ID NO: 993
  misc_feature 1..36: note = Probe
  source 1..36: mol_type = other DNA

SEQ ID NO: 48271 - DNA, 37 bp, synthetic construct; identical to SEQ ID NO: 5830
  misc_feature 1..37: note = Probe
  source 1..37: mol_type = other DNA

SEQ ID NO: 48272 - DNA, 38 bp, synthetic construct; identical to SEQ ID NO: 5831
  misc_feature 1..38: note = Probe
  source 1..38: mol_type = other DNA

SEQ ID NO: 48273 - DNA, 38 bp, synthetic construct; identical to SEQ ID NO: 5832
  misc_feature 1..38: note = Probe
  source 1..38: mol_type = other DNA

SEQ ID NO: 48274 - DNA, 16 bp, synthetic construct
  misc_feature 1..16: note = Probe
  source 1..16: mol_type = other DNA
gcagagcccggtaatc

SEQ ID NO: 48275 - DNA, 19 bp, synthetic construct
  misc_feature 1..19: note = Probe
  source 1..19: mol_type = other DNA
gcagagcccggtaatcgca

SEQ ID NO: 48276 - DNA, 22 bp, synthetic construct
  misc_feature 1..22: note = Probe
  source 1..22: mol_type = other DNA
gcagagcccggtaatcgcataa

SEQ ID NO: 48277 - DNA, 42 bp, synthetic construct
  misc_feature 1..42: note = Probe
  source 1..42: mol_type = other DNA
gcagagcccggtaatcgcataaaacttaaaactttacagtca

SEQ ID NO: 48278 - DNA, 44 bp, synthetic construct
  misc_feature 1..44: note = Probe
  source 1..44: mol_type = other DNA
gcagagcccggtaatcgcataaaacttaaaactttacagtcaga

SEQ ID NO: 48279 - DNA, 16 bp, synthetic construct
  misc_feature 1..16: note = Probe
  source 1..16: mol_type = other DNA
gcagagtggggttttg

SEQ ID NO: 48280 - DNA, 26 bp, synthetic construct
  misc_feature 1..26: note = Probe
  source 1..26: mol_type = other DNA
gcagagtggggttttgcagtccttag

SEQ ID NO: 48281 - DNA, 27 bp, synthetic construct
  misc_feature 1..27: note = Probe
  source 1..27: mol_type = other DNA
gcagagtggggttttgcagtccttagc

SEQ ID NO: 48282 - DNA, 28 bp, synthetic construct
  misc_feature 1..28: note = Probe
  source 1..28: mol_type = other DNA
gcagagtggggttttgcagtccttagct

SEQ ID NO: 48283 - DNA, 31 bp, synthetic construct; identical to SEQ ID NO: 5838
  misc_feature 1..31: note = Probe
  source 1..31: mol_type = other DNA

SEQ ID NO: 48284 - DNA, 32 bp, synthetic construct; identical to SEQ ID NO: 20582
  misc_feature 1..32: note = Probe
  source 1..32: mol_type = other DNA

SEQ ID NO: 48285 - DNA, 33 bp, synthetic construct; identical to SEQ ID NO: 20583
  misc_feature 1..33: note = Probe
  source 1..33: mol_type = other DNA

SEQ ID NO: 48286 - DNA, 35 bp, synthetic construct
  misc_feature 1..35: note = Probe
  source 1..35: mol_type = other DNA
gcagcaacctcggttcgaatccgagtcacggcaaa

SEQ ID NO: 48287 - DNA, 35 bp, synthetic construct
  misc_feature 1..35: note = Probe
  source 1..35: mol_type = other DNA
gcagcaacctcggttcgaatccgagtcacggcagg

SEQ ID NO: 48288 - DNA, 36 bp, synthetic construct; identical to SEQ ID NO: 5839
  misc_feature 1..36: note = Probe
  source 1..36: mol_type = other DNA

SEQ ID NO: 48289 - DNA, 35 bp, synthetic construct
  misc_feature 1..35: note = Probe
  source 1..35: mol_type = other DNA
gcagcaacctcggttcgaatccgagtcacggcatt

SEQ ID NO: 48290 - DNA, 36 bp, synthetic construct; identical to SEQ ID NO: 5840
  misc_feature 1..36: note = Probe
  source 1..36: mol_type = other DNA

SEQ ID NO: 48291 - DNA, 33 bp, synthetic construct; identical to SEQ ID NO: 20612
  misc_feature 1..33: note = Probe
  source 1..33: mol_type = other DNA

SEQ ID NO: 48292 - DNA, 25 bp, synthetic construct
  misc_feature 1..25: note = Probe
  source 1..25: mol_type = other DNA
gcataaaacttaaaactttacagtc

SEQ ID NO: 48293 - DNA, 28 bp, synthetic construct
  misc_feature 1..28: note = Probe
  source 1..28: mol_type = other DNA
gcataaaacttaaaactttacagtcaga

SEQ ID NO: 48294 - DNA, 29 bp, synthetic construct
  misc_feature 1..29: note = Probe
  source 1..29: mol_type = other DNA
gcataaaacttaaaactttacagtcagag

SEQ ID NO: 48295 - DNA, 33 bp, synthetic construct; identical to SEQ ID NO: 5847
  misc_feature 1..33: note = Probe
  source 1..33: mol_type = other DNA

SEQ ID NO: 48296 - DNA, 34 bp, synthetic construct
  misc_feature 1..34: note = Probe
  source 1..34: mol_type = other DNA
gcataaaacttaaaactttacagtcagaggttca

SEQ ID NO: 48297 - DNA, 50 bp, synthetic construct; identical to SEQ ID NO: 5851
  misc_feature 1..50: note = Probe
  source 1..50: mol_type = other DNA

SEQ ID NO: 48298 - DNA, 28 bp, synthetic construct
  misc_feature 1..28: note = Probe
  source 1..28: mol_type = other DNA
gcatagctgccttccaagcagttgaccc

SEQ ID NO: 48299 - DNA, 50 bp, synthetic construct
  misc_feature 1..50: note = Probe
  source 1..50: mol_type = other DNA
gcatagctgccttccaagcagttgacccgggttcgattcccggccaacgc

SEQ ID NO: 48300 - DNA, 27 bp, synthetic construct
  misc_feature 1..27: note = Probe
  source 1..27: mol_type = other DNA
gcataggtggttcagtggtagaattct

SEQ ID NO: 48301 - DNA, 29 bp, synthetic construct
  misc_feature 1..29: note = Probe
  source 1..29: mol_type = other DNA
gcataggtggttcagtggtagaattcttg

SEQ ID NO: 48302 - DNA, 30 bp, synthetic construct; identical to SEQ ID NO: 10307
  misc_feature 1..30: note = Probe
  source 1..30: mol_type = other DNA

SEQ ID NO: 48303 - DNA, 31 bp, synthetic construct; identical to SEQ ID NO: 5857
  misc_feature 1..31: note = Probe
  source 1..31: mol_type = other DNA

SEQ ID NO: 48304 - DNA, 32 bp, synthetic construct; identical to SEQ ID NO: 5858
  misc_feature 1..32: note = Probe
  source 1..32: mol_type = other DNA

SEQ ID NO: 48305 - DNA, 33 bp, synthetic construct; identical to SEQ ID NO: 5859
  misc_feature 1..33: note = Probe
  source 1..33: mol_type = other DNA

SEQ ID NO: 48306 - DNA, 34 bp, synthetic construct; identical to SEQ ID NO: 20629
  misc_feature 1..34: note = Probe
  source 1..34: mol_type = other DNA

SEQ ID NO: 48307 - DNA, 35 bp, synthetic construct; identical to SEQ ID NO: 20630
  misc_feature 1..35: note = Probe
  source 1..35: mol_type = other DNA

SEQ ID NO: 48308 - DNA, 35 bp, synthetic construct; identical to SEQ ID NO: 13456
  misc_feature 1..35: note = Probe
  source 1..35: mol_type = other DNA

SEQ ID NO: 48309 - DNA, 38 bp, synthetic construct; identical to SEQ ID NO: 5861
  misc_feature 1..38: note = Probe
  source 1..38: mol_type = other DNA

SEQ ID NO: 48310 - DNA, 27 bp, synthetic construct
  misc_feature 1..27: note = Probe
  source 1..27: mol_type = other DNA
gcatgggtgattcagtggtagaatttt

SEQ ID NO: 48311 - DNA, 16 bp, synthetic construct
  misc_feature 1..16: note = Probe
  source 1..16: mol_type = other DNA
gcatgggtggttcagt

SEQ ID NO: 48312 - DNA, 18 bp, synthetic construct
  misc_feature 1..18: note = Probe
  source 1..18: mol_type = other DNA
gcatgggtggttcagtgg

SEQ ID NO: 48313 - DNA, 19 bp, synthetic construct
  misc_feature 1..19: note = Probe
  source 1..19: mol_type = other DNA
gcatgggtggttcagtggt

SEQ ID NO: 48314 - DNA, 20 bp, synthetic construct
  misc_feature 1..20: note = Probe
  source 1..20: mol_type = other DNA
gcatgggtggttcagtggta

SEQ ID NO: 48315 - DNA, 21 bp, synthetic construct
  misc_feature 1..21: note = Probe
  source 1..21: mol_type = other DNA
gcatgggtggttcagtggtag

SEQ ID NO: 48316 - DNA, 22 bp, synthetic construct
  misc_feature 1..22: note = Probe
  source 1..22: mol_type = other DNA
gcatgggtggttcagtggtaga

SEQ ID NO: 48317 - DNA, 23 bp, synthetic construct
  misc_feature 1..23: note = Probe
  source 1..23: mol_type = other DNA
gcatgggtggttcagtggtagaa

SEQ ID NO: 48318 - DNA, 24 bp, synthetic construct
  misc_feature 1..24: note = Probe
  source 1..24: mol_type = other DNA
gcatgggtggttcagtggtagaat

SEQ ID NO: 48319 - DNA, 25 bp, synthetic construct
  misc_feature 1..25: note = Probe
  source 1..25: mol_type = other DNA
gcatgggtggttcagtggtagaatt

SEQ ID NO: 48320 - DNA, 26 bp, synthetic construct
  misc_feature 1..26: note = Probe
  source 1..26: mol_type = other DNA
gcatgggtggttcagtggtagaattc

SEQ ID NO: 48321 - DNA, 27 bp, synthetic construct
  misc_feature 1..27: note = Probe
  source 1..27: mol_type = other DNA
gcatgggtggttcagtggtagaattct

SEQ ID NO: 48322 - DNA, 36 bp, synthetic construct; identical to SEQ ID NO: 1008
  misc_feature 1..36: note = Probe
  source 1..36: mol_type = other DNA

SEQ ID NO: 48323 - DNA, 38 bp, synthetic construct; identical to SEQ ID NO: 1009
  misc_feature 1..38: note = Probe
  source 1..38: mol_type = other DNA

SEQ ID NO: 48324 - DNA, 40 bp, synthetic construct; identical to SEQ ID NO: 5872
  misc_feature 1..40: note = Probe
  source 1..40: mol_type = other DNA

SEQ ID NO: 48325 - DNA, 49 bp, synthetic construct; identical to SEQ ID NO: 5876
  misc_feature 1..49: note = Probe
  source 1..49: mol_type = other DNA

SEQ ID NO: 48326 - DNA, 25 bp, synthetic construct
  misc_feature 1..25: note = Probe
  source 1..25: mol_type = other DNA
gcattaaccttttaagttaaagatt

SEQ ID NO: 48327 - DNA, 26 bp, synthetic construct
  misc_feature 1..26: note = Probe
  source 1..26: mol_type = other DNA
gcattaaccttttaagttaaagatta

SEQ ID NO: 48328 - DNA, 30 bp, synthetic construct; identical to SEQ ID NO: 20658
  misc_feature 1..30: note = Probe
  source 1..30: mol_type = other DNA

SEQ ID NO: 48329 - DNA, 31 bp, synthetic construct; identical to SEQ ID NO: 20659
  misc_feature 1..31: note = Probe
  source 1..31: mol_type = other DNA

SEQ ID NO: 48330 - DNA, 32 bp, synthetic construct; identical to SEQ ID NO: 20660
  misc_feature 1..32: note = Probe
  source 1..32: mol_type = other DNA

SEQ ID NO: 48331 - DNA, 33 bp, synthetic construct; identical to SEQ ID NO: 5879
  misc_feature 1..33: note = Probe
  source 1..33: mol_type = other DNA

SEQ ID NO: 48332 - DNA, 35 bp, synthetic construct; identical to SEQ ID NO: 13475
  misc_feature 1..35: note = Probe
  source 1..35: mol_type = other DNA

SEQ ID NO: 48333 - DNA, 40 bp, synthetic construct; identical to SEQ ID NO: 5880
  misc_feature 1..40: note = Probe
  source 1..40: mol_type = other DNA

SEQ ID NO: 48334 - DNA, 49 bp, synthetic construct; identical to SEQ ID NO: 5881
  misc_feature 1..49: note = Probe
  source 1..49: mol_type = other DNA

SEQ ID NO: 48335 - DNA, 50 bp, synthetic construct; identical to SEQ ID NO: 5882
  misc_feature 1..50: note = Probe
  source 1..50: mol_type = other DNA

SEQ ID NO: 48336 - DNA, 27 bp, synthetic construct
  misc_feature 1..27: note = Probe
  source 1..27: mol_type = other DNA
gcattggtggttcaatggtagaattct

SEQ ID NO: 48337 - DNA, 30 bp, synthetic construct; identical to SEQ ID NO: 10328
  misc_feature 1..30: note = Probe
  source 1..30: mol_type = other DNA

SEQ ID NO: 48338 - DNA, 33 bp, synthetic construct; identical to SEQ ID NO: 5885
  misc_feature 1..33: note = Probe
  source 1..33: mol_type = other DNA

SEQ ID NO: 48339 - DNA, 34 bp, synthetic construct; identical to SEQ ID NO: 20670
  misc_feature 1..34: note = Probe
  source 1..34: mol_type = other DNA

SEQ ID NO: 48340 - DNA, 35 bp, synthetic construct; identical to SEQ ID NO: 20671
  misc_feature 1..35: note = Probe
  source 1..35: mol_type = other DNA

SEQ ID NO: 48341 - DNA, 16 bp, synthetic construct
  misc_feature 1..16: note = Probe
  source 1..16: mol_type = other DNA
gcattggtggttcagt

SEQ ID NO: 48342 - DNA, 17 bp, synthetic construct
  misc_feature 1..17: note = Probe
  source 1..17: mol_type = other DNA
gcattggtggttcagtg

SEQ ID NO: 48343 - DNA, 18 bp, synthetic construct
  misc_feature 1..18: note = Probe
  source 1..18: mol_type = other DNA
gcattggtggttcagtgg

SEQ ID NO: 48344 - DNA, 19 bp, synthetic construct
  misc_feature 1..19: note = Probe
  source 1..19: mol_type = other DNA
gcattggtggttcagtggt

SEQ ID NO: 48345 - DNA, 20 bp, synthetic construct
  misc_feature 1..20: note = Probe
  source 1..20: mol_type = other DNA
gcattggtggttcagtggta

SEQ ID NO: 48346 - DNA, 21 bp, synthetic construct
  misc_feature 1..21: note = Probe
  source 1..21: mol_type = other DNA
gcattggtggttcagtggtag

SEQ ID NO: 48347 - DNA, 22 bp, synthetic construct
  misc_feature 1..22: note = Probe
  source 1..22: mol_type = other DNA
gcattggtggttcagtggtaga

SEQ ID NO: 48348 - DNA, 23 bp, synthetic construct
  misc_feature 1..23: note = Probe
  source 1..23: mol_type = other DNA
gcattggtggttcagtggtagaa

SEQ ID NO: 48349 - DNA, 24 bp, synthetic construct
  misc_feature 1..24: note = Probe
  source 1..24: mol_type = other DNA
gcattggtggttcagtggtagaat

SEQ ID NO: 48350 - DNA, 25 bp, synthetic construct
  misc_feature 1..25: note = Probe
  source 1..25: mol_type = other DNA
gcattggtggttcagtggtagaatt

SEQ ID NO: 48351 - DNA, 26 bp, synthetic construct
  misc_feature 1..26: note = Probe
  source 1..26: mol_type = other DNA
gcattggtggttcagtggtagaattc

SEQ ID NO: 48352 - DNA, 27 bp, synthetic construct
  misc_feature 1..27: note = Probe
  source 1..27: mol_type = other DNA
gcattggtggttcagtggtagaattct

SEQ ID NO: 48353 - DNA, 28 bp, synthetic construct
  misc_feature 1..28: note = Probe
  source 1..28: mol_type = other DNA
gcattggtggttcagtggtagaattctc

SEQ ID NO: 48354 - DNA, 29 bp, synthetic construct
  misc_feature 1..29: note = Probe
  source 1..29: mol_type = other DNA
gcattggtggttcagtggtagaattctcg

SEQ ID NO: 48355 - DNA, 30 bp, synthetic construct; identical to SEQ ID NO: 5900
  misc_feature 1..30: note = Probe
  source 1..30: mol_type = other DNA

SEQ ID NO: 48356 - DNA, 31 bp, synthetic construct; identical to SEQ ID NO: 5901
  misc_feature 1..31: note = Probe
  source 1..31: mol_type = other DNA

SEQ ID NO: 48357 - DNA, 32 bp, synthetic construct; identical to SEQ ID NO: 5902
  misc_feature 1..32: note = Probe
  source 1..32: mol_type = other DNA

SEQ ID NO: 48358 - DNA, 33 bp, synthetic construct; identical to SEQ ID NO: 5903
  misc_feature 1..33: note = Probe
  source 1..33: mol_type = other DNA

SEQ ID NO: 48359 - DNA, 34 bp, synthetic construct; identical to SEQ ID NO: 5904
  misc_feature 1..34: note = Probe
  source 1..34: mol_type = other DNA

SEQ ID NO: 48360 - DNA, 35 bp, synthetic construct; identical to SEQ ID NO: 5905
  misc_feature 1..35: note = Probe
  source 1..35: mol_type = other DNA

SEQ ID NO: 48361 - DNA, 36 bp, synthetic construct; identical to SEQ ID NO: 5906
  misc_feature 1..36: note = Probe
  source 1..36: mol_type = other DNA

SEQ ID NO: 48362 - DNA, 33 bp, synthetic construct; identical to SEQ ID NO: 5908
  misc_feature 1..33: note = Probe
  source 1..33: mol_type = other DNA

SEQ ID NO: 48363 - DNA, 34 bp, synthetic construct; identical to SEQ ID NO: 5909
  misc_feature 1..34: note = Probe
  source 1..34: mol_type = other DNA

SEQ ID NO: 48364 - DNA, 35 bp, synthetic construct; identical to SEQ ID NO: 5910
  misc_feature 1..35: note = Probe
  source 1..35: mol_type = other DNA

SEQ ID NO: 48365 - DNA, 36 bp, synthetic construct; identical to SEQ ID NO: 5911
  misc_feature 1..36: note = Probe
  source 1..36: mol_type = other DNA

SEQ ID NO: 48366 - DNA, 37 bp, synthetic construct; identical to SEQ ID NO: 5912
  misc_feature 1..37: note = Probe
  source 1..37: mol_type = other DNA

SEQ ID NO: 48367 - DNA, 38 bp, synthetic construct; identical to SEQ ID NO: 1014
  misc_feature 1..38: note = Probe
  source 1..38: mol_type = other DNA

SEQ ID NO: 48368 - DNA, 39 bp, synthetic construct; identical to SEQ ID NO: 1015
  misc_feature 1..39: note = Probe
  source 1..39: mol_type = other DNA

SEQ ID NO: 48369 - DNA, 41 bp, synthetic construct; identical to SEQ ID NO: 1017
  misc_feature 1..41: note = Probe
  source 1..41: mol_type = other DNA

SEQ ID NO: 48370 - DNA, 43 bp, synthetic construct; identical to SEQ ID NO: 5914
  misc_feature 1..43: note = Probe
  source 1..43: mol_type = other DNA

SEQ ID NO: 48371 - DNA, 44 bp, synthetic construct; identical to SEQ ID NO: 1018
  misc_feature 1..44: note = Probe
  source 1..44: mol_type = other DNA

SEQ ID NO: 48372 - DNA, 45 bp, synthetic construct; identical to SEQ ID NO: 5915
  misc_feature 1..45: note = Probe
  source 1..45: mol_type = other DNA

SEQ ID NO: 48373 - DNA, 46 bp, synthetic construct; identical to SEQ ID NO: 5916
  misc_feature 1..46: note = Probe
  source 1..46: mol_type = other DNA

SEQ ID NO: 48374 - DNA, 47 bp, synthetic construct; identical to SEQ ID NO: 5917
  misc_feature 1..47: note = Probe
  source 1..47: mol_type = other DNA

SEQ ID NO: 48375 - DNA, 48 bp, synthetic construct; identical to SEQ ID NO: 5918
  misc_feature 1..48: note = Probe
  source 1..48: mol_type = other DNA

SEQ ID NO: 48376 - DNA, 49 bp, synthetic construct; identical to SEQ ID NO: 1019
  misc_feature 1..49: note = Probe
  source 1..49: mol_type = other DNA

SEQ ID NO: 48377 - DNA, 37 bp, synthetic construct; identical to SEQ ID NO: 5919
  misc_feature 1..37: note = Probe
  source 1..37: mol_type = other DNA

SEQ ID NO: 48378 - DNA, 38 bp, synthetic construct; identical to SEQ ID NO: 20705
  misc_feature 1..38: note = Probe
  source 1..38: mol_type = other DNA

SEQ ID NO: 48379 - DNA, 48 bp, synthetic construct
  misc_feature 1..48: note = Probe
  source 1..48: mol_type = other DNA
gcattggtggttcagtggtagaattctcgcctgccatgcgggcggccg

SEQ ID NO: 48380 - DNA, 49 bp, synthetic construct
  misc_feature 1..49: note = Probe
  source 1..49: mol_type = other DNA
gcattggtggttcagtggtagaattctcgcctgccatgcgggcggccgg

SEQ ID NO: 48381 - DNA, 50 bp, synthetic construct; identical to SEQ ID NO: 5921
  misc_feature 1..50: note = Probe
  source 1..50: mol_type = other DNA

SEQ ID NO: 48382 - DNA, 19 bp, synthetic construct
  misc_feature 1..19: note = Probe
  source 1..19: mol_type = other DNA
gccaacctcctactcctca

SEQ ID NO: 48383 - DNA, 31 bp, synthetic construct
  misc_feature 1..31: note = Probe
  source 1..31: mol_type = other DNA
gccaaggtcgcgggttcgatccccgtacggg

SEQ ID NO: 48384 - DNA, 32 bp, synthetic construct; identical to SEQ ID NO: 20712
  misc_feature 1..32: note = Probe
  source 1..32: mol_type = other DNA

SEQ ID NO: 48385 - DNA, 37 bp, synthetic construct; identical to SEQ ID NO: 5922
  misc_feature 1..37: note = Probe
  source 1..37: mol_type = other DNA

SEQ ID NO: 48386 - DNA, 37 bp, synthetic construct; identical to SEQ ID NO: 5923
  misc_feature 1..37: note = Probe
  source 1..37: mol_type = other DNA

SEQ ID NO: 48387 - DNA, 26 bp, synthetic construct
  misc_feature 1..26: note = Probe
  source 1..26: mol_type = other DNA
gccacacctcagaaggtctcactttt

SEQ ID NO: 48388 - DNA, 20 bp, synthetic construct
  misc_feature 1..20: note = Probe
  source 1..20: mol_type = other DNA
gccacgcgggaggcccgggt

SEQ ID NO: 48389 - DNA, 39 bp, synthetic construct; identical to SEQ ID NO: 5925
  misc_feature 1..39: note = Probe
  source 1..39: mol_type = other DNA

SEQ ID NO: 48390 - DNA, 42 bp, synthetic construct
  misc_feature 1..42: note = Probe
  source 1..42: mol_type = other DNA
gccacgcgggaggcccgggttcgattcccggccaatgcaagt

SEQ ID NO: 48391 - DNA, 42 bp, synthetic construct; identical to SEQ ID NO: 5926
  misc_feature 1..42: note = Probe
  source 1..42: mol_type = other DNA

SEQ ID NO: 48392 - DNA, 44 bp, synthetic construct
  misc_feature 1..44: note = Probe
  source 1..44: mol_type = other DNA
gccacgcgggaggcccgggttcgattcccggccaatgcacgagt

SEQ ID NO: 48393 - DNA, 42 bp, synthetic construct; identical to SEQ ID NO: 20722
  misc_feature 1..42: note = Probe
  source 1..42: mol_type = other DNA

SEQ ID NO: 48394 - DNA, 42 bp, synthetic construct; identical to SEQ ID NO: 5929
  misc_feature 1..42: note = Probe
  source 1..42: mol_type = other DNA

SEQ ID NO: 48395 - DNA, 33 bp, synthetic construct; identical to SEQ ID NO: 20734
  misc_feature 1..33: note = Probe
  source 1..33: mol_type = other DNA

SEQ ID NO: 48396 - DNA, 34 bp, synthetic construct
  misc_feature 1..34: note = Probe
  source 1..34: mol_type = other DNA
gccagggattgtgggttcgagtcccatctggggt

SEQ ID NO: 48397 - DNA, 36 bp, synthetic construct; identical to SEQ ID NO: 31799
  misc_feature 1..36: note = Probe
  source 1..36: mol_type = other DNA

SEQ ID NO: 48398 - DNA, 38 bp, synthetic construct; identical to SEQ ID NO: 5932
  misc_feature 1..38: note = Probe
  source 1..38: mol_type = other DNA

SEQ ID NO: 48399 - DNA, 16 bp, synthetic construct
  misc_feature 1..16: note = Probe
  source 1..16: mol_type = other DNA
gcccacccagggacgc

SEQ ID NO: 48400 - DNA, 17 bp, synthetic construct
  misc_feature 1..17: note = Probe
  source 1..17: mol_type = other DNA
gcccacccagggacgcc

SEQ ID NO: 48401 - DNA, 31 bp, synthetic construct; identical to SEQ ID NO: 20745
  misc_feature 1..31: note = Probe
  source 1..31: mol_type = other DNA

SEQ ID NO: 48402 - DNA, 32 bp, synthetic construct; identical to SEQ ID NO: 5934
  misc_feature 1..32: note = Probe
  source 1..32: mol_type = other DNA

SEQ ID NO: 48403 - DNA, 33 bp, synthetic construct; identical to SEQ ID NO: 5935
  misc_feature 1..33: note = Probe
  source 1..33: mol_type = other DNA

SEQ ID NO: 48404 - DNA, 34 bp, synthetic construct; identical to SEQ ID NO: 20748
  misc_feature 1..34: note = Probe
  source 1..34: mol_type = other DNA

SEQ ID NO: 48405 - DNA, 31 bp, synthetic construct; identical to SEQ ID NO: 5936
  misc_feature 1..31: note = Probe
  source 1..31: mol_type = other DNA

SEQ ID NO: 48406 - DNA, 32 bp, synthetic construct; identical to SEQ ID NO: 5937
  misc_feature 1..32: note = Probe
  source 1..32: mol_type = other DNA

SEQ ID NO: 48407 - DNA, 33 bp, synthetic construct; identical to SEQ ID NO: 5938
  misc_feature 1..33: note = Probe
  source 1..33: mol_type = other DNA

SEQ ID NO: 48408 - DNA, 34 bp, synthetic construct; identical to SEQ ID NO: 5939
  misc_feature 1..34: note = Probe
  source 1..34: mol_type = other DNA

SEQ ID NO: 48409 - DNA, 36 bp, synthetic construct; identical to SEQ ID NO: 5940
  misc_feature 1..36: note = Probe
  source 1..36: mol_type = other DNA

SEQ ID NO: 48410 - DNA, 46 bp, synthetic construct; identical to SEQ ID NO: 5942
  misc_feature 1..46: note = Probe
  source 1..46: mol_type = other DNA

SEQ ID NO: 48411 - DNA, 29 bp, synthetic construct
  misc_feature 1..29: note = Probe
  source 1..29: mol_type = other DNA
gcccataccccgaaaatgttggttatacc

SEQ ID NO: 48412 - DNA, 36 bp, synthetic construct; identical to SEQ ID NO: 31810
  misc_feature 1..36: note = Probe
  source 1..36: mol_type = other DNA

SEQ ID NO: 48413 - DNA, 39 bp, synthetic construct
  misc_feature 1..39: note = Probe
  source 1..39: mol_type = other DNA
gcccataccccgaaaatgttggttatacccttcccgtac

SEQ ID NO: 48414 - DNA, 40 bp, synthetic construct
  misc_feature 1..40: note = Probe
  source 1..40: mol_type = other DNA
gcccataccccgaaaatgttggttatacccttcccgtact

SEQ ID NO: 48415 - DNA, 42 bp, synthetic construct
  misc_feature 1..42: note = Probe
  source 1..42: mol_type = other DNA
gcccataccccgaaaatgttggttatacccttcccgtactaa

SEQ ID NO: 48416 - DNA, 43 bp, synthetic construct; identical to SEQ ID NO: 5948
  misc_feature 1..43: note = Probe
  source 1..43: mol_type = other DNA

SEQ ID NO: 48417 - DNA, 44 bp, synthetic construct; identical to SEQ ID NO: 5949
  misc_feature 1..44: note = Probe
  source 1..44: mol_type = other DNA

SEQ ID NO: 48418 - DNA, 50 bp, synthetic construct
  misc_feature 1..50: note = Probe
  source 1..50: mol_type = other DNA
gcccataccccgaaaatgttggttatacccttcccgtactaattaatccc

SEQ ID NO: 48419 - DNA, 20 bp, synthetic construct
  misc_feature 1..20: note = Probe
  source 1..20: mol_type = other DNA
gccccaaacccactccacct

SEQ ID NO: 48420 - DNA, 26 bp, synthetic construct
  misc_feature 1..26: note = Probe
  source 1..26: mol_type = other DNA
gccccaactaaatactaccgtatggc

SEQ ID NO: 48421 - DNA, 31 bp, synthetic construct; identical to SEQ ID NO: 20768
  misc_feature 1..31: note = Probe
  source 1..31: mol_type = other DNA

SEQ ID NO: 48422 - DNA, 33 bp, synthetic construct; identical to SEQ ID NO: 20769
  misc_feature 1..33: note = Probe
  source 1..33: mol_type = other DNA

SEQ ID NO: 48423 - DNA, 34 bp, synthetic construct; identical to SEQ ID NO: 20770
  misc_feature 1..34: note = Probe
  source 1..34: mol_type = other DNA

SEQ ID NO: 48424 - DNA, 16 bp, synthetic construct
  misc_feature 1..16: note = Probe
  source 1..16: mol_type = other DNA
gcccccatgtctaaca

SEQ ID NO: 48425 - DNA, 17 bp, synthetic construct
  misc_feature 1..17: note = Probe
  source 1..17: mol_type = other DNA
gcccccatgtctaacaa

SEQ ID NO: 48426 - DNA, 18 bp, synthetic construct
  misc_feature 1..18: note = Probe
  source 1..18: mol_type = other DNA
gcccccatgtctaacaac

SEQ ID NO: 48427 - DNA, 19 bp, synthetic construct
  misc_feature 1..19: note = Probe
  source 1..19: mol_type = other DNA
gcccccatgtctaacaaca

SEQ ID NO: 48428 - DNA, 20 bp, synthetic construct
  misc_feature 1..20: note = Probe
  source 1..20: mol_type = other DNA
gcccccatgtctaacaacat

SEQ ID NO: 48429 - DNA, 21 bp, synthetic construct
  misc_feature 1..21: note = Probe
  source 1..21: mol_type = other DNA
gcccccatgtctaacaacatg

SEQ ID NO: 48430 - DNA, 22 bp, synthetic construct
  misc_feature 1..22: note = Probe
  source 1..22: mol_type = other DNA
gcccccatgtctaacaacatgg

SEQ ID NO: 48431 - DNA, 23 bp, synthetic construct
  misc_feature 1..23: note = Probe
  source 1..23: mol_type = other DNA
gcccccatgtctaacaacatggc

SEQ ID NO: 48432 - DNA, 24 bp, synthetic construct
  misc_feature 1..24: note = Probe
  source 1..24: mol_type = other DNA
gcccccatgtctaacaacatggct

SEQ ID NO: 48433 - DNA, 25 bp, synthetic construct
  misc_feature 1..25: note = Probe
  source 1..25: mol_type = other DNA
gcccccatgtctaacaacatggctt

SEQ ID NO: 48434 - DNA, 26 bp, synthetic construct
  misc_feature 1..26: note = Probe
  source 1..26: mol_type = other DNA
gcccccatgtctaacaacatggcttt

SEQ ID NO: 48435 - DNA, 27 bp, synthetic construct
  misc_feature 1..27: note = Probe
  source 1..27: mol_type = other DNA
gcccccatgtctaacaacatggctttc

SEQ ID NO: 48436 - DNA, 28 bp, synthetic construct
  misc_feature 1..28: note = Probe
  source 1..28: mol_type = other DNA
gcccccatgtctaacaacatggctttct

SEQ ID NO: 48437 - DNA, 29 bp, synthetic construct
  misc_feature 1..29: note = Probe
  source 1..29: mol_type = other DNA
gcccccatgtctaacaacatggctttctc

SEQ ID NO: 48438 - DNA, 30 bp, synthetic construct; identical to SEQ ID NO: 5966
  misc_feature 1..30: note = Probe
  source 1..30: mol_type = other DNA

SEQ ID NO: 48439 - DNA, 31 bp, synthetic construct; identical to SEQ ID NO: 5967
  misc_feature 1..31: note = Probe
  source 1..31: mol_type = other DNA

SEQ ID NO: 48440 - DNA, 32 bp, synthetic construct; identical to SEQ ID NO: 5968
  misc_feature 1..32: note = Probe
  source 1..32: mol_type = other DNA

SEQ ID NO: 48441 - DNA, 33 bp, synthetic construct; identical to SEQ ID NO: 5969
  misc_feature 1..33: note = Probe
  source 1..33: mol_type = other DNA

SEQ ID NO: 48442 - DNA, 34 bp, synthetic construct; identical to SEQ ID NO: 5970
  misc_feature 1..34: note = Probe
  source 1..34: mol_type = other DNA

SEQ ID NO: 48443 - DNA, 35 bp, synthetic construct; identical to SEQ ID NO: 5971
  misc_feature 1..35: note = Probe
  source 1..35: mol_type = other DNA

SEQ ID NO: 48444 - DNA, 36 bp, synthetic construct; identical to SEQ ID NO: 5972
  misc_feature 1..36: note = Probe
  source 1..36: mol_type = other DNA

SEQ ID NO: 48445 - DNA, 37 bp, synthetic construct; identical to SEQ ID NO: 5973
  misc_feature 1..37: note = Probe
  source 1..37: mol_type = other DNA

SEQ ID NO: 48446 - DNA, 25 bp, synthetic construct
  misc_feature 1..25: note = Probe
  source 1..25: mol_type = other DNA
gccccgggttcaatccccggcacct

SEQ ID NO: 48447 - DNA, 26 bp, synthetic construct
  misc_feature 1..26: note = Probe
  source 1..26: mol_type = other DNA
gccccgggttcaatccccggcacctc

SEQ ID NO: 48448 - DNA, 27 bp, synthetic construct
  misc_feature 1..27: note = Probe
  source 1..27: mol_type = other DNA
gccccgggttcaatccccggcacctcc

SEQ ID NO: 48449 - DNA, 28 bp, synthetic construct
  misc_feature 1..28: note = Probe
  source 1..28: mol_type = other DNA
gccccgggttcaatccccggcacctcca

SEQ ID NO: 48450 - DNA, 29 bp, synthetic construct
  misc_feature 1..29: note = Probe
  source 1..29: mol_type = other DNA
gccccgggttcaatccccggcacctccag

SEQ ID NO: 48451 - DNA, 29 bp, synthetic construct
  misc_feature 1..29: note = Probe
  source 1..29: mol_type = other DNA
gccccgggttcaatccccggcacctccat

SEQ ID NO: 48452 - DNA, 31 bp, synthetic construct; identical to SEQ ID NO: 20801
  misc_feature 1..31: note = Probe
  source 1..31: mol_type = other DNA

SEQ ID NO: 48453 - DNA, 25 bp, synthetic construct
  misc_feature 1..25: note = Probe
  source 1..25: mol_type = other DNA
gccccgggttcgatccccggcatct

SEQ ID NO: 48454 - DNA, 28 bp, synthetic construct
  misc_feature 1..28: note = Probe
  source 1..28: mol_type = other DNA
gccccgggttcgatccccggcatctcca

SEQ ID NO: 48455 - DNA, 31 bp, synthetic construct; identical to SEQ ID NO: 5979
  misc_feature 1..31: note = Probe
  source 1..31: mol_type = other DNA

SEQ ID NO: 48456 - DNA, 33 bp, synthetic construct
  misc_feature 1..33: note = Probe
  source 1..33: mol_type = other DNA
gccccggtggcctaatggataaggcattggcct

SEQ ID NO: 48457 - DNA, 36 bp, synthetic construct
  misc_feature 1..36: note = Probe
  source 1..36: mol_type = other DNA
gccccggtggcctaatggataaggcattggcctcct

SEQ ID NO: 48458 - DNA, 28 bp, synthetic construct
  misc_feature 1..28: note = Probe
  source 1..28: mol_type = other DNA
gcccctcatttacataaatattatacta

SEQ ID NO: 48459 - DNA, 32 bp, synthetic construct
  misc_feature 1..32: note = Probe
  source 1..32: mol_type = other DNA
gcccgactacctcagtcggtggagcatgggac

SEQ ID NO: 48460 - DNA, 33 bp, synthetic construct; identical to SEQ ID NO: 5982
  misc_feature 1..33: note = Probe
  source 1..33: mol_type = other DNA

SEQ ID NO: 48461 - DNA, 31 bp, synthetic construct
  misc_feature 1..31: note = Probe
  source 1..31: mol_type = other DNA
gcccggagagctcagtgggtagagcatcaga

SEQ ID NO: 48462 - DNA, 32 bp, synthetic construct
  misc_feature 1..32: note = Probe
  source 1..32: mol_type = other DNA
gcccggagagctcagtgggtagagcatcagac

SEQ ID NO: 48463 - DNA, 33 bp, synthetic construct; identical to SEQ ID NO: 5983
  misc_feature 1..33: note = Probe
  source 1..33: mol_type = other DNA

SEQ ID NO: 48464 - DNA, 16 bp, synthetic construct
  misc_feature 1..16: note = Probe
  source 1..16: mol_type = other DNA
gcccggatagctcagt

SEQ ID NO: 48465 - DNA, 17 bp, synthetic construct
  misc_feature 1..17: note = Probe
  source 1..17: mol_type = other DNA
gcccggatagctcagtc

SEQ ID NO: 48466 - DNA, 24 bp, synthetic construct
  misc_feature 1..24: note = Probe
  source 1..24: mol_type = other DNA
gcccggatagctcagtcggtagag

SEQ ID NO: 48467 - DNA, 28 bp, synthetic construct
  misc_feature 1..28: note = Probe
  source 1..28: mol_type = other DNA
gcccggatagctcagtcggtagagcatc

SEQ ID NO: 48468 - DNA, 38 bp, synthetic construct; identical to SEQ ID NO: 5987
  misc_feature 1..38: note = Probe
  source 1..38: mol_type = other DNA

SEQ ID NO: 48469 - DNA, 39 bp, synthetic construct; identical to SEQ ID NO: 5988
  misc_feature 1..39: note = Probe
  source 1..39: mol_type = other DNA

SEQ ID NO: 48470 - DNA, 41 bp, synthetic construct; identical to SEQ ID NO: 5989
  misc_feature 1..41: note = Probe
  source 1..41: mol_type = other DNA

SEQ ID NO: 48471 - DNA, 49 bp, synthetic construct
  misc_feature 1..49: note = Probe
  source 1..49: mol_type = other DNA
gcccggatagctcagtcggtagagcatcagacttttaatctgagggtcc

SEQ ID NO: 48472 - DNA, 50 bp, synthetic construct; identical to SEQ ID NO: 40318
  misc_feature 1..50: note = Probe
  source 1..50: mol_type = other DNA

SEQ ID NO: 48473 - DNA, 31 bp, synthetic construct; identical to SEQ ID NO: 20818
  misc_feature 1..31: note = Probe
  source 1..31: mol_type = other DNA

SEQ ID NO: 48474 - DNA, 32 bp, synthetic construct; identical to SEQ ID NO: 5990
  misc_feature 1..32: note = Probe
  source 1..32: mol_type = other DNA

SEQ ID NO: 48475 - DNA, 33 bp, synthetic construct; identical to SEQ ID NO: 5991
  misc_feature 1..33: note = Probe
  source 1..33: mol_type = other DNA

SEQ ID NO: 48476 - DNA, 34 bp, synthetic construct; identical to SEQ ID NO: 5992
  misc_feature 1..34: note = Probe
  source 1..34: mol_type = other DNA

SEQ ID NO: 48477 - DNA, 19 bp, synthetic construct
  misc_feature 1..19: note = Probe
  source 1..19: mol_type = other DNA
gcccggctagctcagtcga

SEQ ID NO: 48478 - DNA, 34 bp, synthetic construct; identical to SEQ ID NO: 5995
  misc_feature 1..34: note = Probe
  source 1..34: mol_type = other DNA

SEQ ID NO: 48479 - DNA, 36 bp, synthetic construct; identical to SEQ ID NO: 5996
  misc_feature 1..36: note = Probe
  source 1..36: mol_type = other DNA

SEQ ID NO: 48480 - DNA, 22 bp, synthetic construct
  misc_feature 1..22: note = Probe
  source 1..22: mol_type = other DNA
gcccggctagctcagtcggtag

SEQ ID NO: 48481 - DNA, 24 bp, synthetic construct
  misc_feature 1..24: note = Probe
  source 1..24: mol_type = other DNA
gcccggctagctcagtcggtagag

SEQ ID NO: 48482 - DNA, 27 bp, synthetic construct
  misc_feature 1..27: note = Probe
  source 1..27: mol_type = other DNA
gcccggctagctcagtcggtagagcat

SEQ ID NO: 48483 - DNA, 35 bp, synthetic construct; identical to SEQ ID NO: 1067
  misc_feature 1..35: note = Probe
  source 1..35: mol_type = other DNA

SEQ ID NO: 48484 - DNA, 36 bp, synthetic construct; identical to SEQ ID NO: 1068
  misc_feature 1..36: note = Probe
  source 1..36: mol_type = other DNA

SEQ ID NO: 48485 - DNA, 38 bp, synthetic construct; identical to SEQ ID NO: 13544
  misc_feature 1..38: note = Probe
  source 1..38: mol_type = other DNA

SEQ ID NO: 48486 - DNA, 39 bp, synthetic construct; identical to SEQ ID NO: 1075
  misc_feature 1..39: note = Probe
  source 1..39: mol_type = other DNA

SEQ ID NO: 48487 - DNA, 41 bp, synthetic construct; identical to SEQ ID NO: 5997
  misc_feature 1..41: note = Probe
  source 1..41: mol_type = other DNA

SEQ ID NO: 48488 - DNA, 45 bp, synthetic construct; identical to SEQ ID NO: 5998
  misc_feature 1..45: note = Probe
  source 1..45: mol_type = other DNA

SEQ ID NO: 48489 - DNA, 48 bp, synthetic construct
  misc_feature 1..48: note = Probe
  source 1..48: mol_type = other DNA
gcccggctagctcagtcggtagagcatgagactcttaatctcagggtc

SEQ ID NO: 48490 - DNA, 37 bp, synthetic construct; identical to SEQ ID NO: 1087
  misc_feature 1..37: note = Probe
  source 1..37: mol_type = other DNA

SEQ ID NO: 48491 - DNA, 38 bp, synthetic construct; identical to SEQ ID NO: 6000
  misc_feature 1..38: note = Probe
  source 1..38: mol_type = other DNA

SEQ ID NO: 48492 - DNA, 39 bp, synthetic construct; identical to SEQ ID NO: 6001
  misc_feature 1..39: note = Probe
  source 1..39: mol_type = other DNA

SEQ ID NO: 48493 - DNA, 40 bp, synthetic construct; identical to SEQ ID NO: 1088
  misc_feature 1..40: note = Probe
  source 1..40: mol_type = other DNA

SEQ ID NO: 48494 - DNA, 42 bp, synthetic construct; identical to SEQ ID NO: 1089
  misc_feature 1..42: note = Probe
  source 1..42: mol_type = other DNA

SEQ ID NO: 48495 - DNA, 45 bp, synthetic construct; identical to SEQ ID NO: 1090
  misc_feature 1..45: note = Probe
  source 1..45: mol_type = other DNA

SEQ ID NO: 48496 - DNA, 46 bp, synthetic construct; identical to SEQ ID NO: 6004
  misc_feature 1..46: note = Probe
  source 1..46: mol_type = other DNA

SEQ ID NO: 48497 - DNA, 47 bp, synthetic construct
  misc_feature 1..47: note = Probe
  source 1..47: mol_type = other DNA
gcccggctagctcagtcggtagagcatgggactcttaatcccagggt

SEQ ID NO: 48498 - DNA, 48 bp, synthetic construct; identical to SEQ ID NO: 6005
  misc_feature 1..48: note = Probe
  source 1..48: mol_type = other DNA

SEQ ID NO: 48499 - DNA, 49 bp, synthetic construct; identical to SEQ ID NO: 6006
  misc_feature 1..49: note = Probe
  source 1..49: mol_type = other DNA

SEQ ID NO: 48500 - DNA, 50 bp, synthetic construct; identical to SEQ ID NO: 1091
  misc_feature 1..50: note = Probe
  source 1..50: mol_type = other DNA

SEQ ID NO: 48501 - DNA, 50 bp, synthetic construct; identical to SEQ ID NO: 6007
  misc_feature 1..50: note = Probe
  source 1..50: mol_type = other DNA

SEQ ID NO: 48502 - DNA, 30 bp, synthetic construct; identical to SEQ ID NO: 20839
  misc_feature 1..30: note = Probe
  source 1..30: mol_type = other DNA

SEQ ID NO: 48503 - DNA, 30 bp, synthetic construct; identical to SEQ ID NO: 6008
  misc_feature 1..30: note = Probe
  source 1..30: mol_type = other DNA

SEQ ID NO: 48504 - DNA, 30 bp, synthetic construct; identical to SEQ ID NO: 20841
  misc_feature 1..30: note = Probe
  source 1..30: mol_type = other DNA

SEQ ID NO: 48505 - DNA, 30 bp, synthetic construct; identical to SEQ ID NO: 20842
  misc_feature 1..30: note = Probe
  source 1..30: mol_type = other DNA

SEQ ID NO: 48506 - DNA, 23 bp, synthetic construct
  misc_feature 1..23: note = Probe
  source 1..23: mol_type = other DNA
gcccggtaatcgcataaaactta

SEQ ID NO: 48507 - DNA, 28 bp, synthetic construct
  misc_feature 1..28: note = Probe
  source 1..28: mol_type = other DNA
gcccggtaatcgcataaaacttaaaact

SEQ ID NO: 48508 - DNA, 40 bp, synthetic construct
  misc_feature 1..40: note = Probe
  source 1..40: mol_type = other DNA
gcccggtaatcgcataaaacttaaaactttacagtcagag

SEQ ID NO: 48509 - DNA, 43 bp, synthetic construct
  misc_feature 1..43: note = Probe
  source 1..43: mol_type = other DNA
gcccggtaatcgcataaaacttaaaactttacagtcagaggtt

SEQ ID NO: 48510 - DNA, 45 bp, synthetic construct; identical to SEQ ID NO: 6011
  misc_feature 1..45: note = Probe
  source 1..45: mol_type = other DNA

SEQ ID NO: 48511 - DNA, 50 bp, synthetic construct; identical to SEQ ID NO: 6012
  misc_feature 1..50: note = Probe
  source 1..50: mol_type = other DNA

SEQ ID NO: 48512 - DNA, 20 bp, synthetic construct
  misc_feature 1..20: note = Probe
  source 1..20: mol_type = other DNA
gccctcagtaagttgcaata

SEQ ID NO: 48513 - DNA, 19 bp, synthetic construct
  misc_feature 1..19: note = Probe
  source 1..19: mol_type = other DNA
gccgaaatagctcagttgg

SEQ ID NO: 48514 - DNA, 21 bp, synthetic construct
  misc_feature 1..21: note = Probe
  source 1..21: mol_type = other DNA
gccgaaatagctcagttggga

SEQ ID NO: 48515 - DNA, 22 bp, synthetic construct
  misc_feature 1..22: note = Probe
  source 1..22: mol_type = other DNA
gccgaaatagctcagttgggag

SEQ ID NO: 48516 - DNA, 23 bp, synthetic construct
  misc_feature 1..23: note = Probe
  source 1..23: mol_type = other DNA
gccgaaatagctcagttgggaga

SEQ ID NO: 48517 - DNA, 25 bp, synthetic construct
  misc_feature 1..25: note = Probe
  source 1..25: mol_type = other DNA
gccgaaatagctcagttgggagagc

SEQ ID NO: 48518 - DNA, 31 bp, synthetic construct
  misc_feature 1..31: note = Probe
  source 1..31: mol_type = other DNA
gccgaaatagctcagttgggagagcgttaga

SEQ ID NO: 48519 - DNA, 32 bp, synthetic construct
  misc_feature 1..32: note = Probe
  source 1..32: mol_type = other DNA
gccgaaatagctcagttgggagagcgttagac

SEQ ID NO: 48520 - DNA, 33 bp, synthetic construct
  misc_feature 1..33: note = Probe
  source 1..33: mol_type = other DNA
gccgaaatagctcagttgggagagcgttagact

SEQ ID NO: 48521 - DNA, 37 bp, synthetic construct
  misc_feature 1..37: note = Probe
  source 1..37: mol_type = other DNA
gccgaggttgtgagttcgagcctcacctggagcattg

SEQ ID NO: 48522 - DNA, 32 bp, synthetic construct
  misc_feature 1..32: note = Probe
  source 1..32: mol_type = other DNA
gccgaggttgtgagttcgatcctcacctggag

SEQ ID NO: 48523 - DNA, 30 bp, synthetic construct; identical to SEQ ID NO: 10395
  misc_feature 1..30: note = Probe
  source 1..30: mol_type = other DNA

SEQ ID NO: 48524 - DNA, 31 bp, synthetic construct; identical to SEQ ID NO: 13572
  misc_feature 1..31: note = Probe
  source 1..31: mol_type = other DNA

SEQ ID NO: 48525 - DNA, 33 bp, synthetic construct; identical to SEQ ID NO: 6022
  misc_feature 1..33: note = Probe
  source 1..33: mol_type = other DNA

SEQ ID NO: 48526 - DNA, 34 bp, synthetic construct; identical to SEQ ID NO: 6023
  misc_feature 1..34: note = Probe
  source 1..34: mol_type = other DNA

SEQ ID NO: 48527 - DNA, 34 bp, synthetic construct; identical to SEQ ID NO: 6024
  misc_feature 1..34: note = Probe
  source 1..34: mol_type = other DNA

SEQ ID NO: 48528 - DNA, 36 bp, synthetic construct; identical to SEQ ID NO: 6025
  misc_feature 1..36: note = Probe
  source 1..36: mol_type = other DNA

SEQ ID NO: 48529 - DNA, 34 bp, synthetic construct; identical to SEQ ID NO: 6027
  misc_feature 1..34: note = Probe
  source 1..34: mol_type = other DNA

SEQ ID NO: 48530 - DNA, 36 bp, synthetic construct; identical to SEQ ID NO: 6028
  misc_feature 1..36: note = Probe
  source 1..36: mol_type = other DNA

SEQ ID NO: 48531 - DNA, 27 bp, synthetic construct
  misc_feature 1..27: note = Probe
  source 1..27: mol_type = other DNA
gccgctggtgtagtggtatcatgcaag

SEQ ID NO: 48532 - DNA, 30 bp, synthetic construct; identical to SEQ ID NO: 1100
  misc_feature 1..30: note = Probe
  source 1..30: mol_type = other DNA

SEQ ID NO: 48533 - DNA, 50 bp, synthetic construct
  misc_feature 1..50: note = Probe
  source 1..50: mol_type = other DNA
gccgctggtgtagtggtatcatgcaagattcccattcttgcgacccgggt

SEQ ID NO: 48534 - DNA, 17 bp, synthetic construct
  misc_feature 1..17: note = Probe
  source 1..17: mol_type = other DNA
gccgtgatcgtatagtg

SEQ ID NO: 48535 - DNA, 18 bp, synthetic construct
  misc_feature 1..18: note = Probe
  source 1..18: mol_type = other DNA
gccgtgatcgtatagtgg

SEQ ID NO: 48536 - DNA, 19 bp, synthetic construct
  misc_feature 1..19: note = Probe
  source 1..19: mol_type = other DNA
gccgtgatcgtatagtggt

SEQ ID NO: 48537 - DNA, 20 bp, synthetic construct
  misc_feature 1..20: note = Probe
  source 1..20: mol_type = other DNA
gccgtgatcgtatagtggtt

SEQ ID NO: 48538 - DNA, 22 bp, synthetic construct
  misc_feature 1..22: note = Probe
  source 1..22: mol_type = other DNA
gccgtgatcgtatagtggttag

SEQ ID NO: 48539 - DNA, 23 bp, synthetic construct
  misc_feature 1..23: note = Probe
  source 1..23: mol_type = other DNA
gccgtgatcgtatagtggttagt

SEQ ID NO: 48540 - DNA, 26 bp, synthetic construct
  misc_feature 1..26: note = Probe
  source 1..26: mol_type = other DNA
gccgtgatcgtatagtggttagtact

SEQ ID NO: 48541 - DNA, 27 bp, synthetic construct
  misc_feature 1..27: note = Probe
  source 1..27: mol_type = other DNA
gccgtgatcgtatagtggttagtactc

SEQ ID NO: 48542 - DNA, 28 bp, synthetic construct
  misc_feature 1..28: note = Probe
  source 1..28: mol_type = other DNA
gccgtgatcgtatagtggttagtactct

SEQ ID NO: 48543 - DNA, 29 bp, synthetic construct
  misc_feature 1..29: note = Probe
  source 1..29: mol_type = other DNA
gccgtgatcgtatagtggttagtactctg

SEQ ID NO: 48544 - DNA, 37 bp, synthetic construct; identical to SEQ ID NO: 6039
  misc_feature 1..37: note = Probe
  source 1..37: mol_type = other DNA

SEQ ID NO: 48545 - DNA, 39 bp, synthetic construct; identical to SEQ ID NO: 13591
  misc_feature 1..39: note = Probe
  source 1..39: mol_type = other DNA

SEQ ID NO: 48546 - DNA, 40 bp, synthetic construct; identical to SEQ ID NO: 20911
  misc_feature 1..40: note = Probe
  source 1..40: mol_type = other DNA

SEQ ID NO: 48547 - DNA, 16 bp, synthetic construct
  misc_feature 1..16: note = Probe
  source 1..16: mol_type = other DNA
gcctccttagcgcagt

SEQ ID NO: 48548 - DNA, 19 bp, synthetic construct
  misc_feature 1..19: note = Probe
  source 1..19: mol_type = other DNA
gcctccttagcgcagtagg

SEQ ID NO: 48549 - DNA, 31 bp, synthetic construct
  misc_feature 1..31: note = Probe
  source 1..31: mol_type = other DNA
gcctccttagcgcagtaggcagcgcgtcagt

SEQ ID NO: 48550 - DNA, 32 bp, synthetic construct
  misc_feature 1..32: note = Probe
  source 1..32: mol_type = other DNA
gcctccttagcgcagtaggcagcgcgtcagtc

SEQ ID NO: 48551 - DNA, 33 bp, synthetic construct; identical to SEQ ID NO: 6043
  misc_feature 1..33: note = Probe
  source 1..33: mol_type = other DNA

SEQ ID NO: 48552 - DNA, 16 bp, synthetic construct
  misc_feature 1..16: note = Probe
  source 1..16: mol_type = other DNA
gcctcgttagcgcagt

SEQ ID NO: 48553 - DNA, 19 bp, synthetic construct
  misc_feature 1..19: note = Probe
  source 1..19: mol_type = other DNA
gcctcgttagcgcagtagg

SEQ ID NO: 48554 - DNA, 31 bp, synthetic construct
  misc_feature 1..31: note = Probe
  source 1..31: mol_type = other DNA
gcctcgttagcgcagtaggcagcgcgtcagt

SEQ ID NO: 48555 - DNA, 33 bp, synthetic construct
  misc_feature 1..33: note = Probe
  source 1..33: mol_type = other DNA
gcctcgttagcgcagtaggcagcgcgtcagtct

SEQ ID NO: 48556 - DNA, 20 bp, synthetic construct
  misc_feature 1..20: note = Probe
  source 1..20: mol_type = other DNA
gcctcgttagcgcagtaggt

SEQ ID NO: 48557 - DNA, 21 bp, synthetic construct
  misc_feature 1..21: note = Probe
  source 1..21: mol_type = other DNA
gcctcgttagcgcagtaggta

SEQ ID NO: 48558 - DNA, 23 bp, synthetic construct
  misc_feature 1..23: note = Probe
  source 1..23: mol_type = other DNA
gcctcgttagcgcagtaggtagc

SEQ ID NO: 48559 - DNA, 24 bp, synthetic construct
  misc_feature 1..24: note = Probe
  source 1..24: mol_type = other DNA
gcctcgttagcgcagtaggtagcg

SEQ ID NO: 48560 - DNA, 25 bp, synthetic construct
  misc_feature 1..25: note = Probe
  source 1..25: mol_type = other DNA
gcctcgttagcgcagtaggtagcgc

SEQ ID NO: 48561 - DNA, 31 bp, synthetic construct; identical to SEQ ID NO: 6052
  misc_feature 1..31: note = Probe
  source 1..31: mol_type = other DNA

SEQ ID NO: 48562 - DNA, 34 bp, synthetic construct
  misc_feature 1..34: note = Probe
  source 1..34: mol_type = other DNA
gcctcgttagcgcagtaggtagcgcgtcagtctc

SEQ ID NO: 48563 - DNA, 29 bp, synthetic construct
  misc_feature 1..29: note = Probe
  source 1..29: mol_type = other DNA
gcctggatagctcagttggtagagcatca

SEQ ID NO: 48564 - DNA, 19 bp, synthetic construct
  misc_feature 1..19: note = Probe
  source 1..19: mol_type = other DNA
gcctgggtagctcagtcgg

SEQ ID NO: 48565 - DNA, 34 bp, synthetic construct; identical to SEQ ID NO: 13611
  misc_feature 1..34: note = Probe
  source 1..34: mol_type = other DNA

SEQ ID NO: 48566 - DNA, 35 bp, synthetic construct; identical to SEQ ID NO: 1129
  misc_feature 1..35: note = Probe
  source 1..35: mol_type = other DNA

SEQ ID NO: 48567 - DNA, 24 bp, synthetic construct
  misc_feature 1..24: note = Probe
  source 1..24: mol_type = other DNA
gcctgtcacgcgggagaccggggt

SEQ ID NO: 48568 - DNA, 43 bp, synthetic construct; identical to SEQ ID NO: 36911
  misc_feature 1..43: note = Probe
  source 1..43: mol_type = other DNA

SEQ ID NO: 48569 - DNA, 44 bp, synthetic construct; identical to SEQ ID NO: 6059
  misc_feature 1..44: note = Probe
  source 1..44: mol_type = other DNA

SEQ ID NO: 48570 - DNA, 46 bp, synthetic construct; identical to SEQ ID NO: 6060
  misc_feature 1..46: note = Probe
  source 1..46: mol_type = other DNA

SEQ ID NO: 48571 - DNA, 49 bp, synthetic construct; identical to SEQ ID NO: 6061
  misc_feature 1..49: note = Probe
  source 1..49: mol_type = other DNA

SEQ ID NO: 48572 - DNA, 41 bp, synthetic construct; identical to SEQ ID NO: 13622
  misc_feature 1..41: note = Probe
  source 1..41: mol_type = other DNA

SEQ ID NO: 48573 - DNA, 44 bp, synthetic construct; identical to SEQ ID NO: 6062
  misc_feature 1..44: note = Probe
  source 1..44: mol_type = other DNA

SEQ ID NO: 48574 - DNA, 50 bp, synthetic construct; identical to SEQ ID NO: 6063
  misc_feature 1..50: note = Probe
  source 1..50: mol_type = other DNA

SEQ ID NO: 48575 - DNA, 46 bp, synthetic construct; identical to SEQ ID NO: 6064
  misc_feature 1..46: note = Probe
  source 1..46: mol_type = other DNA

SEQ ID NO: 48576 - DNA, 44 bp, synthetic construct; identical to SEQ ID NO: 6065
  misc_feature 1..44: note = Probe
  source 1..44: mol_type = other DNA

SEQ ID NO: 48577 - DNA, 46 bp, synthetic construct; identical to SEQ ID NO: 20972
  misc_feature 1..46: note = Probe
  source 1..46: mol_type = other DNA

SEQ ID NO: 48578 - DNA, 46 bp, synthetic construct; identical to SEQ ID NO: 6066
  misc_feature 1..46: note = Probe
  source 1..46: mol_type = other DNA

SEQ ID NO: 48579 - DNA, 49 bp, synthetic construct; identical to SEQ ID NO: 6067
  misc_feature 1..49: note = Probe
  source 1..49: mol_type = other DNA

SEQ ID NO: 48580 - DNA, 50 bp, synthetic construct; identical to SEQ ID NO: 6068
  misc_feature 1..50: note = Probe
  source 1..50: mol_type = other DNA

SEQ ID NO: 48581 - DNA, 49 bp, synthetic construct; identical to SEQ ID NO: 6069
  misc_feature 1..49: note = Probe
  source 1..49: mol_type = other DNA

SEQ ID NO: 48582 - DNA, 50 bp, synthetic construct; identical to SEQ ID NO: 20978
  misc_feature 1..50: note = Probe
  source 1..50: mol_type = other DNA

SEQ ID NO: 48583 - DNA, 46 bp, synthetic construct; identical to SEQ ID NO: 6070
  misc_feature 1..46: note = Probe
  source 1..46: mol_type = other DNA

SEQ ID NO: 48584 - DNA, 50 bp, synthetic construct; identical to SEQ ID NO: 20980
  misc_feature 1..50: note = Probe
  source 1..50: mol_type = other DNA

SEQ ID NO: 48585 - DNA, 50 bp, synthetic construct; identical to SEQ ID NO: 20981
  misc_feature 1..50: note = Probe
  source 1..50: mol_type = other DNA

SEQ ID NO: 48586 - DNA, 31 bp, synthetic construct; identical to SEQ ID NO: 31932
  misc_feature 1..31: note = Probe
  source 1..31: mol_type = other DNA

SEQ ID NO: 48587 - DNA, 32 bp, synthetic construct; identical to SEQ ID NO: 6071
  misc_feature 1..32: note = Probe
  source 1..32: mol_type = other DNA

SEQ ID NO: 48588 - DNA, 24 bp, synthetic construct
  misc_feature 1..24: note = Probe
  source 1..24: mol_type = other DNA
gccttttttcccggcggcgggaga

SEQ ID NO: 48589 - DNA, 25 bp, synthetic construct
  misc_feature 1..25: note = Probe
  source 1..25: mol_type = other DNA
gccttttttcccggcggcgggagaa

SEQ ID NO: 48590 - DNA, 26 bp, synthetic construct
  misc_feature 1..26: note = Probe
  source 1..26: mol_type = other DNA
gccttttttcccggcggcgggagaag

SEQ ID NO: 48591 - DNA, 27 bp, synthetic construct
  misc_feature 1..27: note = Probe
  source 1..27: mol_type = other DNA
gccttttttcccggcggcgggagaagt

SEQ ID NO: 48592 - DNA, 31 bp, synthetic construct; identical to SEQ ID NO: 20994
  misc_feature 1..31: note = Probe
  source 1..31: mol_type = other DNA

SEQ ID NO: 48593 - DNA, 32 bp, synthetic construct; identical to SEQ ID NO: 6077
  misc_feature 1..32: note = Probe
  source 1..32: mol_type = other DNA

SEQ ID NO: 48594 - DNA, 35 bp, synthetic construct
  misc_feature 1..35: note = Probe
  source 1..35: mol_type = other DNA
gcgaaaggtccccggttcgaaaccgggcggaaaca

SEQ ID NO: 48595 - DNA, 38 bp, synthetic construct; identical to SEQ ID NO: 6078
  misc_feature 1..38: note = Probe
  source 1..38: mol_type = other DNA

SEQ ID NO: 48596 - DNA, 16 bp, synthetic construct
  misc_feature 1..16: note = Probe
  source 1..16: mol_type = other DNA
gcgagaggtcccgggt

SEQ ID NO: 48597 - DNA, 35 bp, synthetic construct; identical to SEQ ID NO: 21006
  misc_feature 1..35: note = Probe
  source 1..35: mol_type = other DNA

SEQ ID NO: 48598 - DNA, 27 bp, synthetic construct
  misc_feature 1..27: note = Probe
  source 1..27: mol_type = other DNA
gcgatccgagttcaaatctcggtggaa

SEQ ID NO: 48599 - DNA, 28 bp, synthetic construct
  misc_feature 1..28: note = Probe
  source 1..28: mol_type = other DNA
gcgatccgagttcaaatctcggtggaac

SEQ ID NO: 48600 - DNA, 29 bp, synthetic construct
  misc_feature 1..29: note = Probe
  source 1..29: mol_type = other DNA
gcgatccgagttcaaatctcggtggaacc

SEQ ID NO: 48601 - DNA, 31 bp, synthetic construct; identical to SEQ ID NO: 21016
  misc_feature 1..31: note = Probe
  source 1..31: mol_type = other DNA

SEQ ID NO: 48602 - DNA, 33 bp, synthetic construct; identical to SEQ ID NO: 6084
  misc_feature 1..33: note = Probe
  source 1..33: mol_type = other DNA

SEQ ID NO: 48603 - DNA, 31 bp, synthetic construct; identical to SEQ ID NO: 21018
  misc_feature 1..31: note = Probe
  source 1..31: mol_type = other DNA

SEQ ID NO: 48604 - DNA, 28 bp, synthetic construct
  misc_feature 1..28: note = Probe
  source 1..28: mol_type = other DNA
gcgatccgagttcaaatctcggtgggac

SEQ ID NO: 48605 - DNA, 31 bp, synthetic construct
  misc_feature 1..31: note = Probe
  source 1..31: mol_type = other DNA
gcgatccgagttcaaatctcggtgggacctc

SEQ ID NO: 48606 - DNA, 33 bp, synthetic construct; identical to SEQ ID NO: 6086
  misc_feature 1..33: note = Probe
  source 1..33: mol_type = other DNA

SEQ ID NO: 48607 - DNA, 18 bp, synthetic construct
  misc_feature 1..18: note = Probe
  source 1..18: mol_type = other DNA
gcgcaagtaggtctacaa

SEQ ID NO: 48608 - DNA, 25 bp, synthetic construct
  misc_feature 1..25: note = Probe
  source 1..25: mol_type = other DNA
gcgcaggttcgaatcctgccgacta

SEQ ID NO: 48609 - DNA, 24 bp, synthetic construct
  misc_feature 1..24: note = Probe
  source 1..24: mol_type = other DNA
gcgccgctggtgtagtggtatcat

SEQ ID NO: 48610 - DNA, 38 bp, synthetic construct; identical to SEQ ID NO: 6089
  misc_feature 1..38: note = Probe
  source 1..38: mol_type = other DNA

SEQ ID NO: 48611 - DNA, 41 bp, synthetic construct; identical to SEQ ID NO: 1159
  misc_feature 1..41: note = Probe
  source 1..41: mol_type = other DNA

SEQ ID NO: 48612 - DNA, 42 bp, synthetic construct; identical to SEQ ID NO: 6090
  misc_feature 1..42: note = Probe
  source 1..42: mol_type = other DNA

SEQ ID NO: 48613 - DNA, 43 bp, synthetic construct; identical to SEQ ID NO: 6091
  misc_feature 1..43: note = Probe
  source 1..43: mol_type = other DNA

SEQ ID NO: 48614 - DNA, 44 bp, synthetic construct; identical to SEQ ID NO: 6092
  misc_feature 1..44: note = Probe
  source 1..44: mol_type = other DNA

SEQ ID NO: 48615 - DNA, 45 bp, synthetic construct; identical to SEQ ID NO: 6093
  misc_feature 1..45: note = Probe
  source 1..45: mol_type = other DNA

SEQ ID NO: 48616 - DNA, 46 bp, synthetic construct; identical to SEQ ID NO: 1160
  misc_feature 1..46: note = Probe
  source 1..46: mol_type = other DNA

SEQ ID NO: 48617 - DNA, 47 bp, synthetic construct; identical to SEQ ID NO: 6094
  misc_feature 1..47: note = Probe
  source 1..47: mol_type = other DNA

SEQ ID NO: 48618 - DNA, 48 bp, synthetic construct; identical to SEQ ID NO: 6095
  misc_feature 1..48: note = Probe
  source 1..48: mol_type = other DNA

SEQ ID NO: 48619 - DNA, 49 bp, synthetic construct; identical to SEQ ID NO: 6096
  misc_feature 1..49: note = Probe
  source 1..49: mol_type = other DNA

SEQ ID NO: 48620 - DNA, 50 bp, synthetic construct; identical to SEQ ID NO: 40499
  misc_feature 1..50: note = Probe
  source 1..50: mol_type = other DNA

SEQ ID NO: 48621 - DNA, 44 bp, synthetic construct
  misc_feature 1..44: note = Probe
  source 1..44: mol_type = other DNA
gcgctctcaccgccgcggcccgggttcgattcccggtcagggaa

SEQ ID NO: 48622 - DNA, 50 bp, synthetic construct; identical to SEQ ID NO: 21045
  misc_feature 1..50: note = Probe
  source 1..50: mol_type = other DNA

SEQ ID NO: 48623 - DNA, 50 bp, synthetic construct; identical to SEQ ID NO: 6097
  misc_feature 1..50: note = Probe
  source 1..50: mol_type = other DNA

SEQ ID NO: 48624 - DNA, 19 bp, synthetic construct
  misc_feature 1..19: note = Probe
  source 1..19: mol_type = other DNA
gcggaagcgtgctgggccc

SEQ ID NO: 48625 - DNA, 35 bp, synthetic construct; identical to SEQ ID NO: 1163
  misc_feature 1..35: note = Probe
  source 1..35: mol_type = other DNA

SEQ ID NO: 48626 - DNA, 37 bp, synthetic construct; identical to SEQ ID NO: 1164
  misc_feature 1..37: note = Probe
  source 1..37: mol_type = other DNA

SEQ ID NO: 48627 - DNA, 39 bp, synthetic construct; identical to SEQ ID NO: 21050
  misc_feature 1..39: note = Probe
  source 1..39: mol_type = other DNA

SEQ ID NO: 48628 - DNA, 50 bp, synthetic construct
  misc_feature 1..50: note = Probe
  source 1..50: mol_type = other DNA
gcggaagcgtgctgggcccataacccagaggtcgatggatcgaaaccatc

SEQ ID NO: 48629 - DNA, 26 bp, synthetic construct
  misc_feature 1..26: note = Probe
  source 1..26: mol_type = other DNA
gcggcccgggttcgactcccggtgtg

SEQ ID NO: 48630 - DNA, 27 bp, synthetic construct
  misc_feature 1..27: note = Probe
  source 1..27: mol_type = other DNA
gcggcccgggttcgactcccggtgtgg

SEQ ID NO: 48631 - DNA, 28 bp, synthetic construct
  misc_feature 1..28: note = Probe
  source 1..28: mol_type = other DNA
gcggcccgggttcgactcccggtgtggg

SEQ ID NO: 48632 - DNA, 30 bp, synthetic construct; identical to SEQ ID NO: 13658
  misc_feature 1..30: note = Probe
  source 1..30: mol_type = other DNA

SEQ ID NO: 48633 - DNA, 31 bp, synthetic construct; identical to SEQ ID NO: 1165
  misc_feature 1..31: note = Probe
  source 1..31: mol_type = other DNA

SEQ ID NO: 48634 - DNA, 33 bp, synthetic construct; identical to SEQ ID NO: 6099
  misc_feature 1..33: note = Probe
  source 1..33: mol_type = other DNA

SEQ ID NO: 48635 - DNA, 28 bp, synthetic construct
  misc_feature 1..28: note = Probe
  source 1..28: mol_type = other DNA
gcggcccgggttcgattcccggtcaggg

SEQ ID NO: 48636 - DNA, 30 bp, synthetic construct; identical to SEQ ID NO: 13662
  misc_feature 1..30: note = Probe
  source 1..30: mol_type = other DNA

SEQ ID NO: 48637 - DNA, 31 bp, synthetic construct; identical to SEQ ID NO: 6101
  misc_feature 1..31: note = Probe
  source 1..31: mol_type = other DNA

SEQ ID NO: 48638 - DNA, 31 bp, synthetic construct; identical to SEQ ID NO: 6102
  misc_feature 1..31: note = Probe
  source 1..31: mol_type = other DNA

SEQ ID NO: 48639 - DNA, 31 bp, synthetic construct; identical to SEQ ID NO: 6103
  misc_feature 1..31: note = Probe
  source 1..31: mol_type = other DNA

SEQ ID NO: 48640 - DNA, 33 bp, synthetic construct; identical to SEQ ID NO: 6104
  misc_feature 1..33: note = Probe
  source 1..33: mol_type = other DNA

SEQ ID NO: 48641 - DNA, 31 bp, synthetic construct; identical to SEQ ID NO: 6105
  misc_feature 1..31: note = Probe
  source 1..31: mol_type = other DNA

SEQ ID NO: 48642 - DNA, 35 bp, synthetic construct; identical to SEQ ID NO: 6108
  misc_feature 1..35: note = Probe
  source 1..35: mol_type = other DNA

SEQ ID NO: 48643 - DNA, 37 bp, synthetic construct; identical to SEQ ID NO: 6109
  misc_feature 1..37: note = Probe
  source 1..37: mol_type = other DNA

SEQ ID NO: 48644 - DNA, 19 bp, synthetic construct
  misc_feature 1..19: note = Probe
  source 1..19: mol_type = other DNA
gcgggagaccggggttcga

SEQ ID NO: 48645 - DNA, 28 bp, synthetic construct
  misc_feature 1..28: note = Probe
  source 1..28: mol_type = other DNA
gcgggagaccggggttcgattccccgac

SEQ ID NO: 48646 - DNA, 35 bp, synthetic construct; identical to SEQ ID NO: 6112
  misc_feature 1..35: note = Probe
  source 1..35: mol_type = other DNA

SEQ ID NO: 48647 - DNA, 37 bp, synthetic construct; identical to SEQ ID NO: 6114
  misc_feature 1..37: note = Probe
  source 1..37: mol_type = other DNA

SEQ ID NO: 48648 - DNA, 36 bp, synthetic construct; identical to SEQ ID NO: 6115
  misc_feature 1..36: note = Probe
  source 1..36: mol_type = other DNA

SEQ ID NO: 48649 - DNA, 37 bp, synthetic construct; identical to SEQ ID NO: 6116
  misc_feature 1..37: note = Probe
  source 1..37: mol_type = other DNA

SEQ ID NO: 48650 - DNA, 37 bp, synthetic construct; identical to SEQ ID NO: 6117
  misc_feature 1..37: note = Probe
  source 1..37: mol_type = other DNA

SEQ ID NO: 48651 - DNA, 35 bp, synthetic construct; identical to SEQ ID NO: 6118
  misc_feature 1..35: note = Probe
  source 1..35: mol_type = other DNA

SEQ ID NO: 48652 - DNA, 36 bp, synthetic construct; identical to SEQ ID NO: 6120
  misc_feature 1..36: note = Probe
  source 1..36: mol_type = other DNA

SEQ ID NO: 48653 - DNA, 37 bp, synthetic construct; identical to SEQ ID NO: 6121
  misc_feature 1..37: note = Probe
  source 1..37: mol_type = other DNA

SEQ ID NO: 48654 - DNA, 37 bp, synthetic construct; identical to SEQ ID NO: 6122
  misc_feature 1..37: note = Probe
  source 1..37: mol_type = other DNA

SEQ ID NO: 48655 - DNA, 33 bp, synthetic construct; identical to SEQ ID NO: 6124
  misc_feature 1..33: note = Probe
  source 1..33: mol_type = other DNA

SEQ ID NO: 48656 - DNA, 34 bp, synthetic construct; identical to SEQ ID NO: 6125
  misc_feature 1..34: note = Probe
  source 1..34: mol_type = other DNA

SEQ ID NO: 48657 - DNA, 37 bp, synthetic construct; identical to SEQ ID NO: 6128
  misc_feature 1..37: note = Probe
  source 1..37: mol_type = other DNA

SEQ ID NO: 48658 - DNA, 36 bp, synthetic construct; identical to SEQ ID NO: 21112
  misc_feature 1..36: note = Probe
  source 1..36: mol_type = other DNA

SEQ ID NO: 48659 - DNA, 29 bp, synthetic construct
  misc_feature 1..29: note = Probe
  source 1..29: mol_type = other DNA
gcgtgctgggcccataacccagaggtcga

SEQ ID NO: 48660 - DNA, 31 bp, synthetic construct; identical to SEQ ID NO: 1178
  misc_feature 1..31: note = Probe
  source 1..31: mol_type = other DNA

SEQ ID NO: 48661 - DNA, 25 bp, synthetic construct
  misc_feature 1..25: note = Probe
  source 1..25: mol_type = other DNA
gcgtgggttcgaatcccatcctcgt

SEQ ID NO: 48662 - DNA, 16 bp, synthetic construct
  misc_feature 1..16: note = Probe
  source 1..16: mol_type = other DNA
gcgttggtggtatagt

SEQ ID NO: 48663 - DNA, 17 bp, synthetic construct
  misc_feature 1..17: note = Probe
  source 1..17: mol_type = other DNA
gcgttggtggtatagtg

SEQ ID NO: 48664 - DNA, 18 bp, synthetic construct
  misc_feature 1..18: note = Probe
  source 1..18: mol_type = other DNA
gcgttggtggtatagtgg

SEQ ID NO: 48665 - DNA, 19 bp, synthetic construct
  misc_feature 1..19: note = Probe
  source 1..19: mol_type = other DNA
gcgttggtggtatagtggt

SEQ ID NO: 48666 - DNA, 20 bp, synthetic construct
  misc_feature 1..20: note = Probe
  source 1..20: mol_type = other DNA
gcgttggtggtatagtggta

SEQ ID NO: 48667 - DNA, 26 bp, synthetic construct
  misc_feature 1..26: note = Probe
  source 1..26: mol_type = other DNA
gcgttggtggtatagtggtaagcata

SEQ ID NO: 48668 - DNA, 27 bp, synthetic construct
  misc_feature 1..27: note = Probe
  source 1..27: mol_type = other DNA
gcgttggtggtatagtggtaagcatag

SEQ ID NO: 48669 - DNA, 28 bp, synthetic construct
  misc_feature 1..28: note = Probe
  source 1..28: mol_type = other DNA
gcgttggtggtatagtggtaagcatagc

SEQ ID NO: 48670 - DNA, 29 bp, synthetic construct
  misc_feature 1..29: note = Probe
  source 1..29: mol_type = other DNA
gcgttggtggtatagtggtaagcatagct

SEQ ID NO: 48671 - DNA, 37 bp, synthetic construct; identical to SEQ ID NO: 1190
  misc_feature 1..37: note = Probe
  source 1..37: mol_type = other DNA

SEQ ID NO: 48672 - DNA, 40 bp, synthetic construct; identical to SEQ ID NO: 6137
  misc_feature 1..40: note = Probe
  source 1..40: mol_type = other DNA

SEQ ID NO: 48673 - DNA, 44 bp, synthetic construct; identical to SEQ ID NO: 1191
  misc_feature 1..44: note = Probe
  source 1..44: mol_type = other DNA

SEQ ID NO: 48674 - DNA, 48 bp, synthetic construct; identical to SEQ ID NO: 6139
  misc_feature 1..48: note = Probe
  source 1..48: mol_type = other DNA

SEQ ID NO: 48675 - DNA, 49 bp, synthetic construct; identical to SEQ ID NO: 6140
  misc_feature 1..49: note = Probe
  source 1..49: mol_type = other DNA

SEQ ID NO: 48676 - DNA, 50 bp, synthetic construct; identical to SEQ ID NO: 1192
  misc_feature 1..50: note = Probe
  source 1..50: mol_type = other DNA

SEQ ID NO: 48677 - DNA, 20 bp, synthetic construct
  misc_feature 1..20: note = Probe
  source 1..20: mol_type = other DNA
gcgttggtggtatagtggtg

SEQ ID NO: 48678 - DNA, 22 bp, synthetic construct
  misc_feature 1..22: note = Probe
  source 1..22: mol_type = other DNA
gcgttggtggtatagtggtgag

SEQ ID NO: 48679 - DNA, 23 bp, synthetic construct
  misc_feature 1..23: note = Probe
  source 1..23: mol_type = other DNA
gcgttggtggtatagtggtgagc

SEQ ID NO: 48680 - DNA, 24 bp, synthetic construct
  misc_feature 1..24: note = Probe
  source 1..24: mol_type = other DNA
gcgttggtggtatagtggtgagca

SEQ ID NO: 48681 - DNA, 26 bp, synthetic construct
  misc_feature 1..26: note = Probe
  source 1..26: mol_type = other DNA
gcgttggtggtatagtggtgagcata

SEQ ID NO: 48682 - DNA, 27 bp, synthetic construct
  misc_feature 1..27: note = Probe
  source 1..27: mol_type = other DNA
gcgttggtggtatagtggtgagcatag

SEQ ID NO: 48683 - DNA, 28 bp, synthetic construct
  misc_feature 1..28: note = Probe
  source 1..28: mol_type = other DNA
gcgttggtggtatagtggtgagcatagc

SEQ ID NO: 48684 - DNA, 29 bp, synthetic construct
  misc_feature 1..29: note = Probe
  source 1..29: mol_type = other DNA
gcgttggtggtatagtggtgagcatagct

SEQ ID NO: 48685 - DNA, 30 bp, synthetic construct; identical to SEQ ID NO: 6150
  misc_feature 1..30: note = Probe
  source 1..30: mol_type = other DNA

SEQ ID NO: 48686 - DNA, 31 bp, synthetic construct; identical to SEQ ID NO: 6151
  misc_feature 1..31: note = Probe
  source 1..31: mol_type = other DNA

SEQ ID NO: 48687 - DNA, 32 bp, synthetic construct; identical to SEQ ID NO: 6152
  misc_feature 1..32: note = Probe
  source 1..32: mol_type = other DNA

SEQ ID NO: 48688 - DNA, 33 bp, synthetic construct; identical to SEQ ID NO: 6153
  misc_feature 1..33: note = Probe
  source 1..33: mol_type = other DNA

SEQ ID NO: 48689 - DNA, 34 bp, synthetic construct; identical to SEQ ID NO: 6154
  misc_feature 1..34: note = Probe
  source 1..34: mol_type = other DNA

SEQ ID NO: 48690 - DNA, 35 bp, synthetic construct; identical to SEQ ID NO: 6155
  misc_feature 1..35: note = Probe
  source 1..35: mol_type = other DNA

SEQ ID NO: 48691 - DNA, 36 bp, synthetic construct; identical to SEQ ID NO: 6156
  misc_feature 1..36: note = Probe
  source 1..36: mol_type = other DNA

SEQ ID NO: 48692 - DNA, 37 bp, synthetic construct; identical to SEQ ID NO: 6157
  misc_feature 1..37: note = Probe
  source 1..37: mol_type = other DNA

SEQ ID NO: 48693 - DNA, 39 bp, synthetic construct; identical to SEQ ID NO: 6158
  misc_feature 1..39: note = Probe
  source 1..39: mol_type = other DNA

SEQ ID NO: 48694 - DNA, 41 bp, synthetic construct; identical to SEQ ID NO: 13692
  misc_feature 1..41: note = Probe
  source 1..41: mol_type = other DNA

SEQ ID NO: 48695 - DNA, 43 bp, synthetic construct; identical to SEQ ID NO: 6159
  misc_feature 1..43: note = Probe
  source 1..43: mol_type = other DNA

SEQ ID NO: 48696 - DNA, 48 bp, synthetic construct; identical to SEQ ID NO: 6163
  misc_feature 1..48: note = Probe
  source 1..48: mol_type = other DNA

SEQ ID NO: 48697 - DNA, 49 bp, synthetic construct; identical to SEQ ID NO: 6164
  misc_feature 1..49: note = Probe
  source 1..49: mol_type = other DNA

SEQ ID NO: 48698 - DNA, 36 bp, synthetic construct; identical to SEQ ID NO: 21152
  misc_feature 1..36: note = Probe
  source 1..36: mol_type = other DNA

SEQ ID NO: 48699 - DNA, 20 bp, synthetic construct
  misc_feature 1..20: note = Probe
  source 1..20: mol_type = other DNA
gcgttggtggtatagtggtt

SEQ ID NO: 48700 - DNA, 22 bp, synthetic construct
  misc_feature 1..22: note = Probe
  source 1..22: mol_type = other DNA
gcgttggtggtatagtggttag

SEQ ID NO: 48701 - DNA, 23 bp, synthetic construct
  misc_feature 1..23: note = Probe
  source 1..23: mol_type = other DNA
gcgttggtggtatagtggttagc

SEQ ID NO: 48702 - DNA, 24 bp, synthetic construct
  misc_feature 1..24: note = Probe
  source 1..24: mol_type = other DNA
gcgttggtggtatagtggttagca

SEQ ID NO: 48703 - DNA, 26 bp, synthetic construct
  misc_feature 1..26: note = Probe
  source 1..26: mol_type = other DNA
gcgttggtggtatagtggttagcata

SEQ ID NO: 48704 - DNA, 27 bp, synthetic construct
  misc_feature 1..27: note = Probe
  source 1..27: mol_type = other DNA
gcgttggtggtatagtggttagcatag

SEQ ID NO: 48705 - DNA, 28 bp, synthetic construct
  misc_feature 1..28: note = Probe
  source 1..28: mol_type = other DNA
gcgttggtggtatagtggttagcatagc

SEQ ID NO: 48706 - DNA, 29 bp, synthetic construct
  misc_feature 1..29: note = Probe
  source 1..29: mol_type = other DNA
gcgttggtggtatagtggttagcatagct

SEQ ID NO: 48707 - DNA, 30 bp, synthetic construct; identical to SEQ ID NO: 6172
  misc_feature 1..30: note = Probe
  source 1..30: mol_type = other DNA

SEQ ID NO: 48708 - DNA, 31 bp, synthetic construct; identical to SEQ ID NO: 6173
  misc_feature 1..31: note = Probe
  source 1..31: mol_type = other DNA

SEQ ID NO: 48709 - DNA, 32 bp, synthetic construct; identical to SEQ ID NO: 6174
  misc_feature 1..32: note = Probe
  source 1..32: mol_type = other DNA

SEQ ID NO: 48710 - DNA, 33 bp, synthetic construct; identical to SEQ ID NO: 6175
  misc_feature 1..33: note = Probe
  source 1..33: mol_type = other DNA

SEQ ID NO: 48711 - DNA, 34 bp, synthetic construct; identical to SEQ ID NO: 6176
  misc_feature 1..34: note = Probe
  source 1..34: mol_type = other DNA

SEQ ID NO: 48712 - DNA, 35 bp, synthetic construct; identical to SEQ ID NO: 6177
  misc_feature 1..35: note = Probe
  source 1..35: mol_type = other DNA

SEQ ID NO: 48713 - DNA, 36 bp, synthetic construct; identical to SEQ ID NO: 6178
  misc_feature 1..36: note = Probe
  source 1..36: mol_type = other DNA

SEQ ID NO: 48714 - DNA, 37 bp, synthetic construct; identical to SEQ ID NO: 6179
  misc_feature 1..37: note = Probe
  source 1..37: mol_type = other DNA

SEQ ID NO: 48715 - DNA, 39 bp, synthetic construct; identical to SEQ ID NO: 6180
  misc_feature 1..39: note = Probe
  source 1..39: mol_type = other DNA

SEQ ID NO: 48716 - DNA, 40 bp, synthetic construct; identical to SEQ ID NO: 6181
  misc_feature 1..40: note = Probe
  source 1..40: mol_type = other DNA

SEQ ID NO: 48717 - DNA, 44 bp, synthetic construct; identical to SEQ ID NO: 1196
  misc_feature 1..44: note = Probe
  source 1..44: mol_type = other DNA

SEQ ID NO: 48718 - DNA, 48 bp, synthetic construct; identical to SEQ ID NO: 6184
  misc_feature 1..48: note = Probe
  source 1..48: mol_type = other DNA

SEQ ID NO: 48719 - DNA, 49 bp, synthetic construct; identical to SEQ ID NO: 6185
  misc_feature 1..49: note = Probe
  source 1..49: mol_type = other DNA

SEQ ID NO: 48720 - DNA, 50 bp, synthetic construct; identical to SEQ ID NO: 1197
  misc_feature 1..50: note = Probe
  source 1..50: mol_type = other DNA

SEQ ID NO: 48721 - DNA, 27 bp, synthetic construct
  misc_feature 1..27: note = Probe
  source 1..27: mol_type = other DNA
gcgttggtggtttagtggtagaattct

SEQ ID NO: 48722 - DNA, 29 bp, synthetic construct
  misc_feature 1..29: note = Probe
  source 1..29: mol_type = other DNA
gcgttggtggtttagtggtagaattctcg

SEQ ID NO: 48723 - DNA, 30 bp, synthetic construct; identical to SEQ ID NO: 10512
  misc_feature 1..30: note = Probe
  source 1..30: mol_type = other DNA

SEQ ID NO: 48724 - DNA, 31 bp, synthetic construct; identical to SEQ ID NO: 6187
  misc_feature 1..31: note = Probe
  source 1..31: mol_type = other DNA

SEQ ID NO: 48725 - DNA, 32 bp, synthetic construct; identical to SEQ ID NO: 6188
  misc_feature 1..32: note = Probe
  source 1..32: mol_type = other DNA

SEQ ID NO: 48726 - DNA, 16 bp, synthetic construct
  misc_feature 1..16: note = Probe
  source 1..16: mol_type = other DNA
gctaaacctagcccca

SEQ ID NO: 48727 - DNA, 17 bp, synthetic construct
  misc_feature 1..17: note = Probe
  source 1..17: mol_type = other DNA
gctaaacctagccccaa

SEQ ID NO: 48728 - DNA, 18 bp, synthetic construct
  misc_feature 1..18: note = Probe
  source 1..18: mol_type = other DNA
gctaaacctagccccaaa

SEQ ID NO: 48729 - DNA, 19 bp, synthetic construct
  misc_feature 1..19: note = Probe
  source 1..19: mol_type = other DNA
gctaaacctagccccaaac

SEQ ID NO: 48730 - DNA, 20 bp, synthetic construct
  misc_feature 1..20: note = Probe
  source 1..20: mol_type = other DNA
gctaaacctagccccaaacc

SEQ ID NO: 48731 - DNA, 21 bp, synthetic construct
  misc_feature 1..21: note = Probe
  source 1..21: mol_type = other DNA
gctaaacctagccccaaaccc

SEQ ID NO: 48732 - DNA, 22 bp, synthetic construct
  misc_feature 1..22: note = Probe
  source 1..22: mol_type = other DNA
gctaaacctagccccaaaccca

SEQ ID NO: 48733 - DNA, 23 bp, synthetic construct
  misc_feature 1..23: note = Probe
  source 1..23: mol_type = other DNA
gctaaacctagccccaaacccac

SEQ ID NO: 48734 - DNA, 24 bp, synthetic construct
  misc_feature 1..24: note = Probe
  source 1..24: mol_type = other DNA
gctaaacctagccccaaacccact

SEQ ID NO: 48735 - DNA, 25 bp, synthetic construct
  misc_feature 1..25: note = Probe
  source 1..25: mol_type = other DNA
gctaaacctagccccaaacccactc

SEQ ID NO: 48736 - DNA, 26 bp, synthetic construct
  misc_feature 1..26: note = Probe
  source 1..26: mol_type = other DNA
gctaaacctagccccaaacccactcc

SEQ ID NO: 48737 - DNA, 27 bp, synthetic construct
  misc_feature 1..27: note = Probe
  source 1..27: mol_type = other DNA
gctaaacctagccccaaacccactcca

SEQ ID NO: 48738 - DNA, 28 bp, synthetic construct
  misc_feature 1..28: note = Probe
  source 1..28: mol_type = other DNA
gctaaacctagccccaaacccactccac

SEQ ID NO: 48739 - DNA, 29 bp, synthetic construct
  misc_feature 1..29: note = Probe
  source 1..29: mol_type = other DNA
gctaaacctagccccaaacccactccacc

SEQ ID NO: 48740 - DNA, 30 bp, synthetic construct; identical to SEQ ID NO: 6203
  misc_feature 1..30: note = Probe
  source 1..30: mol_type = other DNA

SEQ ID NO: 48741 - DNA, 26 bp, synthetic construct
  misc_feature 1..26: note = Probe
  source 1..26: mol_type = other DNA
gctaaataagctatcgggcccatacc

SEQ ID NO: 48742 - DNA, 27 bp, synthetic construct
  misc_feature 1..27: note = Probe
  source 1..27: mol_type = other DNA
gctaaataagctatcgggcccataccc

SEQ ID NO: 48743 - DNA, 28 bp, synthetic construct
  misc_feature 1..28: note = Probe
  source 1..28: mol_type = other DNA
gctaaataagctatcgggcccatacccc

SEQ ID NO: 48744 - DNA, 29 bp, synthetic construct
  misc_feature 1..29: note = Probe
  source 1..29: mol_type = other DNA
gctaaataagctatcgggcccataccccg

SEQ ID NO: 48745 - DNA, 38 bp, synthetic construct
  misc_feature 1..38: note = Probe
  source 1..38: mol_type = other DNA
gctaaataagctatcgggcccataccccgaaaatgttg

SEQ ID NO: 48746 - DNA, 46 bp, synthetic construct; identical to SEQ ID NO: 6209
  misc_feature 1..46: note = Probe
  source 1..46: mol_type = other DNA

SEQ ID NO: 48747 - DNA, 49 bp, synthetic construct; identical to SEQ ID NO: 6210
  misc_feature 1..49: note = Probe
  source 1..49: mol_type = other DNA

SEQ ID NO: 48748 - DNA, 50 bp, synthetic construct; identical to SEQ ID NO: 6211
  misc_feature 1..50: note = Probe
  source 1..50: mol_type = other DNA

SEQ ID NO: 48749 - DNA, 23 bp, synthetic construct
  misc_feature 1..23: note = Probe
  source 1..23: mol_type = other DNA
gctaaatcctatatatcttaatg

SEQ ID NO: 48750 - DNA, 21 bp, synthetic construct
  misc_feature 1..21: note = Probe
  source 1..21: mol_type = other DNA
gctaactcatgcccccatgtc

SEQ ID NO: 48751 - DNA, 22 bp, synthetic construct
  misc_feature 1..22: note = Probe
  source 1..22: mol_type = other DNA
gctaactcatgcccccatgtct

SEQ ID NO: 48752 - DNA, 26 bp, synthetic construct
  misc_feature 1..26: note = Probe
  source 1..26: mol_type = other DNA
gctaactcatgcccccatgtctaaca

SEQ ID NO: 48753 - DNA, 29 bp, synthetic construct
  misc_feature 1..29: note = Probe
  source 1..29: mol_type = other DNA
gctaactcatgcccccatgtctaacaaca

SEQ ID NO: 48754 - DNA, 37 bp, synthetic construct; identical to SEQ ID NO: 6220
  misc_feature 1..37: note = Probe
  source 1..37: mol_type = other DNA

SEQ ID NO: 48755 - DNA, 38 bp, synthetic construct; identical to SEQ ID NO: 6221
  misc_feature 1..38: note = Probe
  source 1..38: mol_type = other DNA

SEQ ID NO: 48756 - DNA, 40 bp, synthetic construct; identical to SEQ ID NO: 6223
  misc_feature 1..40: note = Probe
  source 1..40: mol_type = other DNA

SEQ ID NO: 48757 - DNA, 41 bp, synthetic construct; identical to SEQ ID NO: 6224
  misc_feature 1..41: note = Probe
  source 1..41: mol_type = other DNA

SEQ ID NO: 48758 - DNA, 42 bp, synthetic construct; identical to SEQ ID NO: 6225
  misc_feature 1..42: note = Probe
  source 1..42: mol_type = other DNA

SEQ ID NO: 48759 - DNA, 43 bp, synthetic construct; identical to SEQ ID NO: 6226
  misc_feature 1..43: note = Probe
  source 1..43: mol_type = other DNA

SEQ ID NO: 48760 - DNA, 50 bp, synthetic construct; identical to SEQ ID NO: 6227
  misc_feature 1..50: note = Probe
  source 1..50: mol_type = other DNA

SEQ ID NO: 48761 - DNA, 43 bp, synthetic construct
  misc_feature 1..43: note = Probe
  source 1..43: mol_type = other DNA
gctaacttagcattaaccttttaagttaaagattaagagaacc

SEQ ID NO: 48762 - DNA, 23 bp, synthetic construct
  misc_feature 1..23: note = Probe
  source 1..23: mol_type = other DNA
gctaaggaagtcctgtgctcagt

SEQ ID NO: 48763 - DNA, 26 bp, synthetic construct
  misc_feature 1..26: note = Probe
  source 1..26: mol_type = other DNA
gctaaggaagtcctgtgctcagtttt

SEQ ID NO: 48764 - DNA, 50 bp, synthetic construct
  misc_feature 1..50: note = Probe
  source 1..50: mol_type = other DNA
gctaataacgccaaggtcgcgggttcgatccccgtacgggccacaggctt

SEQ ID NO: 48765 - DNA, 46 bp, synthetic construct
  misc_feature 1..46: note = Probe
  source 1..46: mol_type = other DNA
gctaataacgccaaggtcgcgggttcgatccccgtactggccacgt

SEQ ID NO: 48766 - DNA, 16 bp, synthetic construct
  misc_feature 1..16: note = Probe
  source 1..16: mol_type = other DNA
gctaatggtggagtta

SEQ ID NO: 48767 - DNA, 18 bp, synthetic construct
  misc_feature 1..18: note = Probe
  source 1..18: mol_type = other DNA
gctaatggtggagttaaa

SEQ ID NO: 48768 - DNA, 19 bp, synthetic construct
  misc_feature 1..19: note = Probe
  source 1..19: mol_type = other DNA
gctaatggtggagttaaag

SEQ ID NO: 48769 - DNA, 20 bp, synthetic construct
  misc_feature 1..20: note = Probe
  source 1..20: mol_type = other DNA
gctaatggtggagttaaaga

SEQ ID NO: 48770 - DNA, 32 bp, synthetic construct; identical to SEQ ID NO: 1198
  misc_feature 1..32: note = Probe
  source 1..32: mol_type = other DNA

SEQ ID NO: 48771 - DNA, 34 bp, synthetic construct; identical to SEQ ID NO: 6233
  misc_feature 1..34: note = Probe
  source 1..34: mol_type = other DNA

SEQ ID NO: 48772 - DNA, 35 bp, synthetic construct; identical to SEQ ID NO: 6234
  misc_feature 1..35: note = Probe
  source 1..35: mol_type = other DNA

SEQ ID NO: 48773 - DNA, 37 bp, synthetic construct; identical to SEQ ID NO: 6235
  misc_feature 1..37: note = Probe
  source 1..37: mol_type = other DNA

SEQ ID NO: 48774 - DNA, 38 bp, synthetic construct; identical to SEQ ID NO: 6236
  misc_feature 1..38: note = Probe
  source 1..38: mol_type = other DNA

SEQ ID NO: 48775 - DNA, 39 bp, synthetic construct; identical to SEQ ID NO: 6237
  misc_feature 1..39: note = Probe
  source 1..39: mol_type = other DNA

SEQ ID NO: 48776 - DNA, 40 bp, synthetic construct; identical to SEQ ID NO: 6238
  misc_feature 1..40: note = Probe
  source 1..40: mol_type = other DNA

SEQ ID NO: 48777 - DNA, 41 bp, synthetic construct; identical to SEQ ID NO: 6239
  misc_feature 1..41: note = Probe
  source 1..41: mol_type = other DNA

SEQ ID NO: 48778 - DNA, 42 bp, synthetic construct; identical to SEQ ID NO: 6240
  misc_feature 1..42: note = Probe
  source 1..42: mol_type = other DNA

SEQ ID NO: 48779 - DNA, 43 bp, synthetic construct; identical to SEQ ID NO: 6241
  misc_feature 1..43: note = Probe
  source 1..43: mol_type = other DNA

SEQ ID NO: 48780 - DNA, 44 bp, synthetic construct
  misc_feature 1..44: note = Probe
  source 1..44: mol_type = other DNA
gctaatggtggagttaaagactttttctctgatttgtccttgga

SEQ ID NO: 48781 - DNA, 21 bp, synthetic construct
  misc_feature 1..21: note = Probe
  source 1..21: mol_type = other DNA
gctacttttaaattctgacct

SEQ ID NO: 48782 - DNA, 22 bp, synthetic construct
  misc_feature 1..22: note = Probe
  source 1..22: mol_type = other DNA
gctacttttaaattctgacctc

SEQ ID NO: 48783 - DNA, 23 bp, synthetic construct
  misc_feature 1..23: note = Probe
  source 1..23: mol_type = other DNA
gctacttttaaattctgacctca

SEQ ID NO: 48784 - DNA, 26 bp, synthetic construct
  misc_feature 1..26: note = Probe
  source 1..26: mol_type = other DNA
gctagctcagtcggtagagcatggga

SEQ ID NO: 48785 - DNA, 27 bp, synthetic construct
  misc_feature 1..27: note = Probe
  source 1..27: mol_type = other DNA
gctagctcagtcggtagagcatgggac

SEQ ID NO: 48786 - DNA, 28 bp, synthetic construct
  misc_feature 1..28: note = Probe
  source 1..28: mol_type = other DNA
gctagctcagtcggtagagcatgggact

SEQ ID NO: 48787 - DNA, 16 bp, synthetic construct
  misc_feature 1..16: note = Probe
  source 1..16: mol_type = other DNA
gctatccattggtctt

SEQ ID NO: 48788 - DNA, 50 bp, synthetic construct
  misc_feature 1..50: note = Probe
  source 1..50: mol_type = other DNA
gctatccattggtcttaggccccaaaaattttggtgcaactccaaataaa

SEQ ID NO: 48789 - DNA, 19 bp, synthetic construct
  misc_feature 1..19: note = Probe
  source 1..19: mol_type = other DNA
gctatcgggcccatacccc

SEQ ID NO: 48790 - DNA, 20 bp, synthetic construct
  misc_feature 1..20: note = Probe
  source 1..20: mol_type = other DNA
gctatcgggcccataccccg

SEQ ID NO: 48791 - DNA, 21 bp, synthetic construct
  misc_feature 1..21: note = Probe
  source 1..21: mol_type = other DNA
gctatcgggcccataccccga

SEQ ID NO: 48792 - DNA, 22 bp, synthetic construct
  misc_feature 1..22: note = Probe
  source 1..22: mol_type = other DNA
gctatcgggcccataccccgaa

SEQ ID NO: 48793 - DNA, 23 bp, synthetic construct
  misc_feature 1..23: note = Probe
  source 1..23: mol_type = other DNA
gctatcgggcccataccccgaaa

SEQ ID NO: 48794 - DNA, 24 bp, synthetic construct
  misc_feature 1..24: note = Probe
  source 1..24: mol_type = other DNA
gctatcgggcccataccccgaaaa

SEQ ID NO: 48795 - DNA, 25 bp, synthetic construct
  misc_feature 1..25: note = Probe
  source 1..25: mol_type = other DNA
gctatcgggcccataccccgaaaat

SEQ ID NO: 48796 - DNA, 26 bp, synthetic construct
  misc_feature 1..26: note = Probe
  source 1..26: mol_type = other DNA
gctatcgggcccataccccgaaaatg

SEQ ID NO: 48797 - DNA, 27 bp, synthetic construct
  misc_feature 1..27: note = Probe
  source 1..27: mol_type = other DNA
gctatcgggcccataccccgaaaatgt

SEQ ID NO: 48798 - DNA, 28 bp, synthetic construct
  misc_feature 1..28: note = Probe
  source 1..28: mol_type = other DNA
gctatcgggcccataccccgaaaatgtt

SEQ ID NO: 48799 - DNA, 29 bp, synthetic construct
  misc_feature 1..29: note = Probe
  source 1..29: mol_type = other DNA
gctatcgggcccataccccgaaaatgttg

SEQ ID NO: 48800 - DNA, 30 bp, synthetic construct; identical to SEQ ID NO: 6264
  misc_feature 1..30: note = Probe
  source 1..30: mol_type = other DNA

SEQ ID NO: 48801 - DNA, 37 bp, synthetic construct
  misc_feature 1..37: note = Probe
  source 1..37: mol_type = other DNA
gctatcgggcccataccccgaaaatgttggttatacc

SEQ ID NO: 48802 - DNA, 42 bp, synthetic construct; identical to SEQ ID NO: 21265
  misc_feature 1..42: note = Probe
  source 1..42: mol_type = other DNA

SEQ ID NO: 48803 - DNA, 44 bp, synthetic construct
  misc_feature 1..44: note = Probe
  source 1..44: mol_type = other DNA
gctatcgggcccataccccgaaaatgttggttatacccttcccg

SEQ ID NO: 48804 - DNA, 46 bp, synthetic construct; identical to SEQ ID NO: 6267
  misc_feature 1..46: note = Probe
  source 1..46: mol_type = other DNA

SEQ ID NO: 48805 - DNA, 48 bp, synthetic construct; identical to SEQ ID NO: 6268
  misc_feature 1..48: note = Probe
  source 1..48: mol_type = other DNA

SEQ ID NO: 48806 - DNA, 50 bp, synthetic construct; identical to SEQ ID NO: 6269
  misc_feature 1..50: note = Probe
  source 1..50: mol_type = other DNA

SEQ ID NO: 48807 - DNA, 24 bp, synthetic construct
  misc_feature 1..24: note = Probe
  source 1..24: mol_type = other DNA
gctcacaagaactgctaactcatg

SEQ ID NO: 48808 - DNA, 25 bp, synthetic construct
  misc_feature 1..25: note = Probe
  source 1..25: mol_type = other DNA
gctcacaagaactgctaactcatgc

SEQ ID NO: 48809 - DNA, 26 bp, synthetic construct
  misc_feature 1..26: note = Probe
  source 1..26: mol_type = other DNA
gctcacaagaactgctaactcatgcc

SEQ ID NO: 48810 - DNA, 28 bp, synthetic construct
  misc_feature 1..28: note = Probe
  source 1..28: mol_type = other DNA
gctcacaagaactgctaactcatgcccc

SEQ ID NO: 48811 - DNA, 31 bp, synthetic construct
  misc_feature 1..31: note = Probe
  source 1..31: mol_type = other DNA
gctcacaagaactgctaactcatgcccccat

SEQ ID NO: 48812 - DNA, 34 bp, synthetic construct
  misc_feature 1..34: note = Probe
  source 1..34: mol_type = other DNA
gctcacaagaactgctaactcatgcccccatgtc

SEQ ID NO: 48813 - DNA, 35 bp, synthetic construct
  misc_feature 1..35: note = Probe
  source 1..35: mol_type = other DNA
gctcacaagaactgctaactcatgcccccatgtct

SEQ ID NO: 48814 - DNA, 16 bp, synthetic construct
  misc_feature 1..16: note = Probe
  source 1..16: mol_type = other DNA
gctcacatcaccccat

SEQ ID NO: 48815 - DNA, 17 bp, synthetic construct
  misc_feature 1..17: note = Probe
  source 1..17: mol_type = other DNA
gctcacatcaccccata

SEQ ID NO: 48816 - DNA, 18 bp, synthetic construct
  misc_feature 1..18: note = Probe
  source 1..18: mol_type = other DNA
gctcacatcaccccataa

SEQ ID NO: 48817 - DNA, 21 bp, synthetic construct
  misc_feature 1..21: note = Probe
  source 1..21: mol_type = other DNA
gctcacatcaccccataaaca

SEQ ID NO: 48818 - DNA, 23 bp, synthetic construct
  misc_feature 1..23: note = Probe
  source 1..23: mol_type = other DNA
gctcacatcaccccataaacaaa

SEQ ID NO: 48819 - DNA, 24 bp, synthetic construct
  misc_feature 1..24: note = Probe
  source 1..24: mol_type = other DNA
gctcacatcaccccataaacaaat

SEQ ID NO: 48820 - DNA, 31 bp, synthetic construct
  misc_feature 1..31: note = Probe
  source 1..31: mol_type = other DNA
gctccagtggcgcaatcggttagcgcgcggt

SEQ ID NO: 48821 - DNA, 33 bp, synthetic construct; identical to SEQ ID NO: 6280
  misc_feature 1..33: note = Probe
  source 1..33: mol_type = other DNA

SEQ ID NO: 48822 - DNA, 35 bp, synthetic construct
  misc_feature 1..35: note = Probe
  source 1..35: mol_type = other DNA
gctccagtggcgcaatcggttagcgcgcggtactt

SEQ ID NO: 48823 - DNA, 36 bp, synthetic construct; identical to SEQ ID NO: 21286
  misc_feature 1..36: note = Probe
  source 1..36: mol_type = other DNA

SEQ ID NO: 48824 - DNA, 18 bp, synthetic construct
  misc_feature 1..18: note = Probe
  source 1..18: mol_type = other DNA
gctccgaggtgattttca

SEQ ID NO: 48825 - DNA, 30 bp, synthetic construct; identical to SEQ ID NO: 1206
  misc_feature 1..30: note = Probe
  source 1..30: mol_type = other DNA

SEQ ID NO: 48826 - DNA, 32 bp, synthetic construct; identical to SEQ ID NO: 6283
  misc_feature 1..32: note = Probe
  source 1..32: mol_type = other DNA

SEQ ID NO: 48827 - DNA, 36 bp, synthetic construct; identical to SEQ ID NO: 32107
  misc_feature 1..36: note = Probe
  source 1..36: mol_type = other DNA

SEQ ID NO: 48828 - DNA, 37 bp, synthetic construct
  misc_feature 1..37: note = Probe
  source 1..37: mol_type = other DNA
gctccgaggtgattttcatattgaattgcaaattcga

SEQ ID NO: 48829 - DNA, 40 bp, synthetic construct
  misc_feature 1..40: note = Probe
  source 1..40: mol_type = other DNA
gctccgaggtgattttcatattgaattgcaaattcgaaga

SEQ ID NO: 48830 - DNA, 43 bp, synthetic construct
  misc_feature 1..43: note = Probe
  source 1..43: mol_type = other DNA
gctccgaggtgattttcatattgaattgcaaattcgaagaagc

SEQ ID NO: 48831 - DNA, 44 bp, synthetic construct; identical to SEQ ID NO: 21294
  misc_feature 1..44: note = Probe
  source 1..44: mol_type = other DNA

SEQ ID NO: 48832 - DNA, 46 bp, synthetic construct; identical to SEQ ID NO: 6285
  misc_feature 1..46: note = Probe
  source 1..46: mol_type = other DNA

SEQ ID NO: 48833 - DNA, 48 bp, synthetic construct
  misc_feature 1..48: note = Probe
  source 1..48: mol_type = other DNA
gctccgaggtgattttcatattgaattgcaaattcgaagaagcagctt

SEQ ID NO: 48834 - DNA, 50 bp, synthetic construct; identical to SEQ ID NO: 6286
  misc_feature 1..50: note = Probe
  source 1..50: mol_type = other DNA

SEQ ID NO: 48835 - DNA, 50 bp, synthetic construct
  misc_feature 1..50: note = Probe
  source 1..50: mol_type = other DNA
gctgccttccaagcagttgacccgggttcgattcccggccaacgcagtgt

SEQ ID NO: 48836 - DNA, 31 bp, synthetic construct; identical to SEQ ID NO: 6288
  misc_feature 1..31: note = Probe
  source 1..31: mol_type = other DNA

SEQ ID NO: 48837 - DNA, 31 bp, synthetic construct; identical to SEQ ID NO: 21305
  misc_feature 1..31: note = Probe
  source 1..31: mol_type = other DNA

SEQ ID NO: 48838 - DNA, 25 bp, synthetic construct
  misc_feature 1..25: note = Probe
  source 1..25: mol_type = other DNA
gctggtgtagtggtatcatgcaaga

SEQ ID NO: 48839 - DNA, 24 bp, synthetic construct
  misc_feature 1..24: note = Probe
  source 1..24: mol_type = other DNA
gctgtgatggccgagtggttaagg

SEQ ID NO: 48840 - DNA, 22 bp, synthetic construct
  misc_feature 1..22: note = Probe
  source 1..22: mol_type = other DNA
gctgttaaccgaaaggttggtg

SEQ ID NO: 48841 - DNA, 24 bp, synthetic construct
  misc_feature 1..24: note = Probe
  source 1..24: mol_type = other DNA
gctgttaaccgaaaggttggtggt

SEQ ID NO: 48842 - DNA, 43 bp, synthetic construct; identical to SEQ ID NO: 40656
  misc_feature 1..43: note = Probe
  source 1..43: mol_type = other DNA

SEQ ID NO: 48843 - DNA, 26 bp, synthetic construct
  misc_feature 1..26: note = Probe
  source 1..26: mol_type = other DNA
gctgttaactaagtgtttgtgggttt

SEQ ID NO: 48844 - DNA, 33 bp, synthetic construct
  misc_feature 1..33: note = Probe
  source 1..33: mol_type = other DNA
gctgttaactaagtgtttgtgggtttaagtccc

SEQ ID NO: 48845 - DNA, 40 bp, synthetic construct; identical to SEQ ID NO: 6299
  misc_feature 1..40: note = Probe
  source 1..40: mol_type = other DNA

SEQ ID NO: 48846 - DNA, 42 bp, synthetic construct; identical to SEQ ID NO: 21316
  misc_feature 1..42: note = Probe
  source 1..42: mol_type = other DNA

SEQ ID NO: 48847 - DNA, 44 bp, synthetic construct; identical to SEQ ID NO: 6300
  misc_feature 1..44: note = Probe
  source 1..44: mol_type = other DNA

SEQ ID NO: 48848 - DNA, 45 bp, synthetic construct; identical to SEQ ID NO: 6301
  misc_feature 1..45: note = Probe
  source 1..45: mol_type = other DNA

SEQ ID NO: 48849 - DNA, 46 bp, synthetic construct; identical to SEQ ID NO: 6302
  misc_feature 1..46: note = Probe
  source 1..46: mol_type = other DNA

SEQ ID NO: 48850 - DNA, 25 bp, synthetic construct
  misc_feature 1..25: note = Probe
  source 1..25: mol_type = other DNA
gctgttacagaaattaagtattgca

SEQ ID NO: 48851 - DNA, 28 bp, synthetic construct
  misc_feature 1..28: note = Probe
  source 1..28: mol_type = other DNA
gctgttacagaaattaagtattgcaact

SEQ ID NO: 48852 - DNA, 30 bp, synthetic construct; identical to SEQ ID NO: 6308
  misc_feature 1..30: note = Probe
  source 1..30: mol_type = other DNA

SEQ ID NO: 48853 - DNA, 23 bp, synthetic construct
  misc_feature 1..23: note = Probe
  source 1..23: mol_type = other DNA
gcttaaacccccttatttctagg

SEQ ID NO: 48854 - DNA, 22 bp, synthetic construct
  misc_feature 1..22: note = Probe
  source 1..22: mol_type = other DNA
gcttacgaccccttatttaccg

SEQ ID NO: 48855 - DNA, 50 bp, synthetic construct
  misc_feature 1..50: note = Probe
  source 1..50: mol_type = other DNA
gcttagctgttaactaagtgtttgtgggtttaagtcccattggtctagta

SEQ ID NO: 48856 - DNA, 28 bp, synthetic construct
  misc_feature 1..28: note = Probe
  source 1..28: mol_type = other DNA
gcttctgtaatgtagtggttatcacatt

SEQ ID NO: 48857 - DNA, 31 bp, synthetic construct; identical to SEQ ID NO: 40680
  misc_feature 1..31: note = Probe
  source 1..31: mol_type = other DNA

SEQ ID NO: 48858 - DNA, 33 bp, synthetic construct; identical to SEQ ID NO: 6322
  misc_feature 1..33: note = Probe
  source 1..33: mol_type = other DNA

SEQ ID NO: 48859 - DNA, 30 bp, synthetic construct; identical to SEQ ID NO: 8646
  misc_feature 1..30: note = Probe
  source 1..30: mol_type = other DNA

SEQ ID NO: 48860 - DNA, 35 bp, synthetic construct; identical to SEQ ID NO: 1217
  misc_feature 1..35: note = Probe
  source 1..35: mol_type = other DNA

SEQ ID NO: 48861 - DNA, 36 bp, synthetic construct; identical to SEQ ID NO: 1218
  misc_feature 1..36: note = Probe
  source 1..36: mol_type = other DNA

SEQ ID NO: 48862 - DNA, 50 bp, synthetic construct; identical to SEQ ID NO: 21335
  misc_feature 1..50: note = Probe
  source 1..50: mol_type = other DNA

SEQ ID NO: 48863 - DNA, 27 bp, synthetic construct
  misc_feature 1..27: note = Probe
  source 1..27: mol_type = other DNA
gctttggggggttcgattccttccttt

SEQ ID NO: 48864 - DNA, 31 bp, synthetic construct; identical to SEQ ID NO: 6328
  misc_feature 1..31: note = Probe
  source 1..31: mol_type = other DNA

SEQ ID NO: 48865 - DNA, 32 bp, synthetic construct; identical to SEQ ID NO: 6329
  misc_feature 1..32: note = Probe
  source 1..32: mol_type = other DNA

SEQ ID NO: 48866 - DNA, 33 bp, synthetic construct; identical to SEQ ID NO: 6330
  misc_feature 1..33: note = Probe
  source 1..33: mol_type = other DNA

SEQ ID NO: 48867 - DNA, 34 bp, synthetic construct; identical to SEQ ID NO: 21347
  misc_feature 1..34: note = Probe
  source 1..34: mol_type = other DNA

SEQ ID NO: 48868 - DNA, 22 bp, synthetic construct
  misc_feature 1..22: note = Probe
  source 1..22: mol_type = other DNA
ggaaagtgcacttggacgaacc

SEQ ID NO: 48869 - DNA, 24 bp, synthetic construct
  misc_feature 1..24: note = Probe
  source 1..24: mol_type = other DNA
ggaagcgtgctgggcccataaccc

SEQ ID NO: 48870 - DNA, 27 bp, synthetic construct
  misc_feature 1..27: note = Probe
  source 1..27: mol_type = other DNA
ggaagcgtgctgggcccataacccaga

SEQ ID NO: 48871 - DNA, 35 bp, synthetic construct; identical to SEQ ID NO: 1228
  misc_feature 1..35: note = Probe
  source 1..35: mol_type = other DNA

SEQ ID NO: 48872 - DNA, 36 bp, synthetic construct; identical to SEQ ID NO: 1229
  misc_feature 1..36: note = Probe
  source 1..36: mol_type = other DNA

SEQ ID NO: 48873 - DNA, 37 bp, synthetic construct; identical to SEQ ID NO: 6332
  misc_feature 1..37: note = Probe
  source 1..37: mol_type = other DNA

SEQ ID NO: 48874 - DNA, 38 bp, synthetic construct; identical to SEQ ID NO: 1230
  misc_feature 1..38: note = Probe
  source 1..38: mol_type = other DNA

SEQ ID NO: 48875 - DNA, 16 bp, synthetic construct
  misc_feature 1..16: note = Probe
  source 1..16: mol_type = other DNA
ggactatgagaatcga

SEQ ID NO: 48876 - DNA, 17 bp, synthetic construct
  misc_feature 1..17: note = Probe
  source 1..17: mol_type = other DNA
ggactatgagaatcgaa

SEQ ID NO: 48877 - DNA, 18 bp, synthetic construct
  misc_feature 1..18: note = Probe
  source 1..18: mol_type = other DNA
ggactatgagaatcgaac

SEQ ID NO: 48878 - DNA, 19 bp, synthetic construct
  misc_feature 1..19: note = Probe
  source 1..19: mol_type = other DNA
ggactatgagaatcgaacc

SEQ ID NO: 48879 - DNA, 20 bp, synthetic construct
  misc_feature 1..20: note = Probe
  source 1..20: mol_type = other DNA
ggactatgagaatcgaaccc

SEQ ID NO: 48880 - DNA, 21 bp, synthetic construct
  misc_feature 1..21: note = Probe
  source 1..21: mol_type = other DNA
ggactatgagaatcgaaccca

SEQ ID NO: 48881 - DNA, 24 bp, synthetic construct
  misc_feature 1..24: note = Probe
  source 1..24: mol_type = other DNA
ggactatgagaatcgaacccatcc

SEQ ID NO: 48882 - DNA, 25 bp, synthetic construct
  misc_feature 1..25: note = Probe
  source 1..25: mol_type = other DNA
ggactatgagaatcgaacccatccc

SEQ ID NO: 48883 - DNA, 27 bp, synthetic construct
  misc_feature 1..27: note = Probe
  source 1..27: mol_type = other DNA
ggactatgagaatcgaacccatccctg

SEQ ID NO: 48884 - DNA, 28 bp, synthetic construct
  misc_feature 1..28: note = Probe
  source 1..28: mol_type = other DNA
ggactatgagaatcgaacccatccctga

SEQ ID NO: 48885 - DNA, 30 bp, synthetic construct; identical to SEQ ID NO: 6337
  misc_feature 1..30: note = Probe
  source 1..30: mol_type = other DNA

SEQ ID NO: 48886 - DNA, 50 bp, synthetic construct
  misc_feature 1..50: note = Probe
  source 1..50: mol_type = other DNA
ggactctgaatccagcgatccgagttcaaatctcggtggaacctttcata

SEQ ID NO: 48887 - DNA, 41 bp, synthetic construct; identical to SEQ ID NO: 6341
  misc_feature 1..41: note = Probe
  source 1..41: mol_type = other DNA

SEQ ID NO: 48888 - DNA, 44 bp, synthetic construct; identical to SEQ ID NO: 6342
  misc_feature 1..44: note = Probe
  source 1..44: mol_type = other DNA

SEQ ID NO: 48889 - DNA, 45 bp, synthetic construct; identical to SEQ ID NO: 6343
  misc_feature 1..45: note = Probe
  source 1..45: mol_type = other DNA

SEQ ID NO: 48890 - DNA, 25 bp, synthetic construct
  misc_feature 1..25: note = Probe
  source 1..25: mol_type = other DNA
ggagaccggggttcaattccccgac

SEQ ID NO: 48891 - DNA, 28 bp, synthetic construct
  misc_feature 1..28: note = Probe
  source 1..28: mol_type = other DNA
ggagaccggggttcaattccccgacggg

SEQ ID NO: 48892 - DNA, 29 bp, synthetic construct
  misc_feature 1..29: note = Probe
  source 1..29: mol_type = other DNA
ggagaccggggttcaattccccgacgggg

SEQ ID NO: 48893 - DNA, 30 bp, synthetic construct; identical to SEQ ID NO: 1235
  misc_feature 1..30: note = Probe
  source 1..30: mol_type = other DNA

SEQ ID NO: 48894 - DNA, 32 bp, synthetic construct; identical to SEQ ID NO: 6344
  misc_feature 1..32: note = Probe
  source 1..32: mol_type = other DNA

SEQ ID NO: 48895 - DNA, 34 bp, synthetic construct; identical to SEQ ID NO: 6346
  misc_feature 1..34: note = Probe
  source 1..34: mol_type = other DNA

SEQ ID NO: 48896 - DNA, 25 bp, synthetic construct
  misc_feature 1..25: note = Probe
  source 1..25: mol_type = other DNA
ggagaccggggttcgattccccgac

SEQ ID NO: 48897 - DNA, 26 bp, synthetic construct
  misc_feature 1..26: note = Probe
  source 1..26: mol_type = other DNA
ggagaccggggttcgattccccgacg

SEQ ID NO: 48898 - DNA, 32 bp, synthetic construct; identical to SEQ ID NO: 6348
  misc_feature 1..32: note = Probe
  source 1..32: mol_type = other DNA

SEQ ID NO: 48899 - DNA, 34 bp, synthetic construct; identical to SEQ ID NO: 6350
  misc_feature 1..34: note = Probe
  source 1..34: mol_type = other DNA

SEQ ID NO: 48900 - DNA, 33 bp, synthetic construct; identical to SEQ ID NO: 6351
  misc_feature 1..33: note = Probe
  source 1..33: mol_type = other DNA

SEQ ID NO: 48901 - DNA, 34 bp, synthetic construct; identical to SEQ ID NO: 21392
  misc_feature 1..34: note = Probe
  source 1..34: mol_type = other DNA

SEQ ID NO: 48902 - DNA, 34 bp, synthetic construct; identical to SEQ ID NO: 6352
  misc_feature 1..34: note = Probe
  source 1..34: mol_type = other DNA

SEQ ID NO: 48903 - DNA, 32 bp, synthetic construct; identical to SEQ ID NO: 6353
  misc_feature 1..32: note = Probe
  source 1..32: mol_type = other DNA

SEQ ID NO: 48904 - DNA, 33 bp, synthetic construct; identical to SEQ ID NO: 6354
  misc_feature 1..33: note = Probe
  source 1..33: mol_type = other DNA

SEQ ID NO: 48905 - DNA, 34 bp, synthetic construct; identical to SEQ ID NO: 6355
  misc_feature 1..34: note = Probe
  source 1..34: mol_type = other DNA

SEQ ID NO: 48906 - DNA, 34 bp, synthetic construct; identical to SEQ ID NO: 21401
  misc_feature 1..34: note = Probe
  source 1..34: mol_type = other DNA

SEQ ID NO: 48907 - DNA, 32 bp, synthetic construct; identical to SEQ ID NO: 21404
  misc_feature 1..32: note = Probe
  source 1..32: mol_type = other DNA

SEQ ID NO: 48908 - DNA, 29 bp, synthetic construct
  misc_feature 1..29: note = Probe
  source 1..29: mol_type = other DNA
ggagatcctgggttcgaatcccagcggtg

SEQ ID NO: 48909 - DNA, 32 bp, synthetic construct; identical to SEQ ID NO: 6356
  misc_feature 1..32: note = Probe
  source 1..32: mol_type = other DNA

SEQ ID NO: 48910 - DNA, 16 bp, synthetic construct
  misc_feature 1..16: note = Probe
  source 1..16: mol_type = other DNA
ggagatgaaaaccttt

SEQ ID NO: 48911 - DNA, 18 bp, synthetic construct
  misc_feature 1..18: note = Probe
  source 1..18: mol_type = other DNA
ggagatgaaaaccttttt

SEQ ID NO: 48912 - DNA, 20 bp, synthetic construct
  misc_feature 1..20: note = Probe
  source 1..20: mol_type = other DNA
ggagatgaaaacctttttcc

SEQ ID NO: 48913 - DNA, 21 bp, synthetic construct
  misc_feature 1..21: note = Probe
  source 1..21: mol_type = other DNA
ggagatgaaaacctttttcca

SEQ ID NO: 48914 - DNA, 26 bp, synthetic construct
  misc_feature 1..26: note = Probe
  source 1..26: mol_type = other DNA
ggagatgaaaacctttttccaaggac

SEQ ID NO: 48915 - DNA, 27 bp, synthetic construct
  misc_feature 1..27: note = Probe
  source 1..27: mol_type = other DNA
ggagatgaaaacctttttccaaggaca

SEQ ID NO: 48916 - DNA, 28 bp, synthetic construct
  misc_feature 1..28: note = Probe
  source 1..28: mol_type = other DNA
ggagatgaaaacctttttccaaggacaa

SEQ ID NO: 48917 - DNA, 29 bp, synthetic construct
  misc_feature 1..29: note = Probe
  source 1..29: mol_type = other DNA
ggagatgaaaacctttttccaaggacaaa

SEQ ID NO: 48918 - DNA, 30 bp, synthetic construct; identical to SEQ ID NO: 6362
  misc_feature 1..30: note = Probe
  source 1..30: mol_type = other DNA

SEQ ID NO: 48919 - DNA, 31 bp, synthetic construct; identical to SEQ ID NO: 6363
  misc_feature 1..31: note = Probe
  source 1..31: mol_type = other DNA

SEQ ID NO: 48920 - DNA, 22 bp, synthetic construct
  misc_feature 1..22: note = Probe
  source 1..22: mol_type = other DNA
ggagatttcaacttaacttgac

SEQ ID NO: 48921 - DNA, 23 bp, synthetic construct
  misc_feature 1..23: note = Probe
  source 1..23: mol_type = other DNA
ggagatttcaacttaacttgacc

SEQ ID NO: 48922 - DNA, 24 bp, synthetic construct
  misc_feature 1..24: note = Probe
  source 1..24: mol_type = other DNA
ggagatttcaacttaacttgaccg

SEQ ID NO: 48923 - DNA, 25 bp, synthetic construct
  misc_feature 1..25: note = Probe
  source 1..25: mol_type = other DNA
ggagatttcaacttaacttgaccgc

SEQ ID NO: 48924 - DNA, 26 bp, synthetic construct
  misc_feature 1..26: note = Probe
  source 1..26: mol_type = other DNA
ggagatttcaacttaacttgaccgct

SEQ ID NO: 48925 - DNA, 27 bp, synthetic construct
  misc_feature 1..27: note = Probe
  source 1..27: mol_type = other DNA
ggagatttcaacttaacttgaccgctc

SEQ ID NO: 48926 - DNA, 28 bp, synthetic construct
  misc_feature 1..28: note = Probe
  source 1..28: mol_type = other DNA
ggagatttcaacttaacttgaccgctct

SEQ ID NO: 48927 - DNA, 29 bp, synthetic construct
  misc_feature 1..29: note = Probe
  source 1..29: mol_type = other DNA
ggagatttcaacttaacttgaccgctctg

SEQ ID NO: 48928 - DNA, 30 bp, synthetic construct; identical to SEQ ID NO: 6372
  misc_feature 1..30: note = Probe
  source 1..30: mol_type = other DNA

SEQ ID NO: 48929 - DNA, 31 bp, synthetic construct; identical to SEQ ID NO: 6373
  misc_feature 1..31: note = Probe
  source 1..31: mol_type = other DNA

SEQ ID NO: 48930 - DNA, 32 bp, synthetic construct; identical to SEQ ID NO: 6374
  misc_feature 1..32: note = Probe
  source 1..32: mol_type = other DNA

SEQ ID NO: 48931 - DNA, 33 bp, synthetic construct; identical to SEQ ID NO: 6375
  misc_feature 1..33: note = Probe
  source 1..33: mol_type = other DNA

SEQ ID NO: 48932 - DNA, 38 bp, synthetic construct; identical to SEQ ID NO: 21447
  misc_feature 1..38: note = Probe
  source 1..38: mol_type = other DNA

SEQ ID NO: 48933 - DNA, 39 bp, synthetic construct; identical to SEQ ID NO: 21448
  misc_feature 1..39: note = Probe
  source 1..39: mol_type = other DNA

SEQ ID NO: 48934 - DNA, 40 bp, synthetic construct; identical to SEQ ID NO: 21449
  misc_feature 1..40: note = Probe
  source 1..40: mol_type = other DNA

SEQ ID NO: 48935 - DNA, 41 bp, synthetic construct; identical to SEQ ID NO: 21450
  misc_feature 1..41: note = Probe
  source 1..41: mol_type = other DNA

SEQ ID NO: 48936 - DNA, 17 bp, synthetic construct
  misc_feature 1..17: note = Probe
  source 1..17: mol_type = other DNA
ggagcttaaaccccctt

SEQ ID NO: 48937 - DNA, 18 bp, synthetic construct
  misc_feature 1..18: note = Probe
  source 1..18: mol_type = other DNA
ggagcttaaaccccctta

SEQ ID NO: 48938 - DNA, 26 bp, synthetic construct
  misc_feature 1..26: note = Probe
  source 1..26: mol_type = other DNA
ggagcttaaacccccttatttctagg

SEQ ID NO: 48939 - DNA, 27 bp, synthetic construct
  misc_feature 1..27: note = Probe
  source 1..27: mol_type = other DNA
ggagcttaaacccccttatttctagga

SEQ ID NO: 48940 - DNA, 31 bp, synthetic construct; identical to SEQ ID NO: 21459
  misc_feature 1..31: note = Probe
  source 1..31: mol_type = other DNA

SEQ ID NO: 48941 - DNA, 34 bp, synthetic construct; identical to SEQ ID NO: 21460
  misc_feature 1..34: note = Probe
  source 1..34: mol_type = other DNA

SEQ ID NO: 48942 - DNA, 34 bp, synthetic construct; identical to SEQ ID NO: 21461
  misc_feature 1..34: note = Probe
  source 1..34: mol_type = other DNA

SEQ ID NO: 48943 - DNA, 29 bp, synthetic construct
  misc_feature 1..29: note = Probe
  source 1..29: mol_type = other DNA
ggaggcgtgggttcgaatcccacttctga

SEQ ID NO: 48944 - DNA, 30 bp, synthetic construct
  misc_feature 1..30: note = Probe
  source 1..30: mol_type = other DNA
ggaggcgtgggttcgaatcccacttctgac

SEQ ID NO: 48945 - DNA, 31 bp, synthetic construct; identical to SEQ ID NO: 21466
  misc_feature 1..31: note = Probe
  source 1..31: mol_type = other DNA

SEQ ID NO: 48946 - DNA, 32 bp, synthetic construct; identical to SEQ ID NO: 21467
  misc_feature 1..32: note = Probe
  source 1..32: mol_type = other DNA

SEQ ID NO: 48947 - DNA, 25 bp, synthetic construct
  misc_feature 1..25: note = Probe
  source 1..25: mol_type = other DNA
ggagttaaagactttttctctgatt

SEQ ID NO: 48948 - DNA, 26 bp, synthetic construct
  misc_feature 1..26: note = Probe
  source 1..26: mol_type = other DNA
ggagttaaagactttttctctgattt

SEQ ID NO: 48949 - DNA, 29 bp, synthetic construct
  misc_feature 1..29: note = Probe
  source 1..29: mol_type = other DNA
ggatagctcagtcggtagagcatcagact

SEQ ID NO: 48950 - DNA, 31 bp, synthetic construct; identical to SEQ ID NO: 1252
  misc_feature 1..31: note = Probe
  source 1..31: mol_type = other DNA

SEQ ID NO: 48951 - DNA, 32 bp, synthetic construct; identical to SEQ ID NO: 1253
  misc_feature 1..32: note = Probe
  source 1..32: mol_type = other DNA

SEQ ID NO: 48952 - DNA, 50 bp, synthetic construct
  misc_feature 1..50: note = Probe
  source 1..50: mol_type = other DNA
ggatagctcagtcggtagagcatcagacttttaatctgagggtccagggt

SEQ ID NO: 48953 - DNA, 21 bp, synthetic construct
  misc_feature 1..21: note = Probe
  source 1..21: mol_type = other DNA
ggatcgaaaccatcctctgct

SEQ ID NO: 48954 - DNA, 25 bp, synthetic construct
  misc_feature 1..25: note = Probe
  source 1..25: mol_type = other DNA
ggatcgaaaccatcctctgctaggt

SEQ ID NO: 48955 - DNA, 24 bp, synthetic construct
  misc_feature 1..24: note = Probe
  source 1..24: mol_type = other DNA
ggatcgaaaccatcctctgctatc

SEQ ID NO: 48956 - DNA, 25 bp, synthetic construct
  misc_feature 1..25: note = Probe
  source 1..25: mol_type = other DNA
ggatcgatgcccgcatcctccactc

SEQ ID NO: 48957 - DNA, 22 bp, synthetic construct
  misc_feature 1..22: note = Probe
  source 1..22: mol_type = other DNA
ggatcgatgcccgcattctcca

SEQ ID NO: 48958 - DNA, 25 bp, synthetic construct
  misc_feature 1..25: note = Probe
  source 1..25: mol_type = other DNA
ggatcgatgcccgcattctccatac

SEQ ID NO: 48959 - DNA, 25 bp, synthetic construct
  misc_feature 1..25: note = Probe
  source 1..25: mol_type = other DNA
ggatggccgagtggtctaaggcgcc

SEQ ID NO: 48960 - DNA, 26 bp, synthetic construct
  misc_feature 1..26: note = Probe
  source 1..26: mol_type = other DNA
ggatggggtgtgataggtggcacgga

SEQ ID NO: 48961 - DNA, 25 bp, synthetic construct
  misc_feature 1..25: note = Probe
  source 1..25: mol_type = other DNA
ggatgggttcgattctcatagtcct

SEQ ID NO: 48962 - DNA, 28 bp, synthetic construct
  misc_feature 1..28: note = Probe
  source 1..28: mol_type = other DNA
ggatgggttcgattctcatagtcctaga

SEQ ID NO: 48963 - DNA, 27 bp, synthetic construct
  misc_feature 1..27: note = Probe
  source 1..27: mol_type = other DNA
ggattggtggtccagtggtagaattct

SEQ ID NO: 48964 - DNA, 23 bp, synthetic construct
  misc_feature 1..23: note = Probe
  source 1..23: mol_type = other DNA
ggattgtgggttcgagtcccatc

SEQ ID NO: 48965 - DNA, 30 bp, synthetic construct; identical to SEQ ID NO: 40742
  misc_feature 1..30: note = Probe
  source 1..30: mol_type = other DNA

SEQ ID NO: 48966 - DNA, 31 bp, synthetic construct
  misc_feature 1..31: note = Probe
  source 1..31: mol_type = other DNA
ggattgtgggttcgagtcccatctggggtgg

SEQ ID NO: 48967 - DNA, 30 bp, synthetic construct
  misc_feature 1..30: note = Probe
  source 1..30: mol_type = other DNA
ggattgtgggttcgagtcccatctgggtcg

SEQ ID NO: 48968 - DNA, 31 bp, synthetic construct
  misc_feature 1..31: note = Probe
  source 1..31: mol_type = other DNA
ggattgtgggttcgagtcccatctgggtcgc

SEQ ID NO: 48969 - DNA, 27 bp, synthetic construct
  misc_feature 1..27: note = Probe
  source 1..27: mol_type = other DNA
ggcacatgcagcgcaagtaggtctaca

SEQ ID NO: 48970 - DNA, 28 bp, synthetic construct
  misc_feature 1..28: note = Probe
  source 1..28: mol_type = other DNA
ggcacatgcagcgcaagtaggtctacaa

SEQ ID NO: 48971 - DNA, 19 bp, synthetic construct
  misc_feature 1..19: note = Probe
  source 1..19: mol_type = other DNA
ggcagcgatggccgagtgg

SEQ ID NO: 48972 - DNA, 21 bp, synthetic construct
  misc_feature 1..21: note = Probe
  source 1..21: mol_type = other DNA
ggcagcgatggccgagtggtt

SEQ ID NO: 48973 - DNA, 32 bp, synthetic construct; identical to SEQ ID NO: 32240
  misc_feature 1..32: note = Probe
  source 1..32: mol_type = other DNA

SEQ ID NO: 48974 - DNA, 33 bp, synthetic construct; identical to SEQ ID NO: 6396
  misc_feature 1..33: note = Probe
  source 1..33: mol_type = other DNA

SEQ ID NO: 48975 - DNA, 20 bp, synthetic construct
  misc_feature 1..20: note = Probe
  source 1..20: mol_type = other DNA
ggccaacctcctactcctca

SEQ ID NO: 48976 - DNA, 19 bp, synthetic construct
  misc_feature 1..19: note = Probe
  source 1..19: mol_type = other DNA
ggcccaacccgtcatctac

SEQ ID NO: 48977 - DNA, 16 bp, synthetic construct
  misc_feature 1..16: note = Probe
  source 1..16: mol_type = other DNA
ggcccataacccagag

SEQ ID NO: 48978 - DNA, 49 bp, synthetic construct; identical to SEQ ID NO: 40749
  misc_feature 1..49: note = Probe
  source 1..49: mol_type = other DNA

SEQ ID NO: 48979 - DNA, 50 bp, synthetic construct; identical to SEQ ID NO: 6398
  misc_feature 1..50: note = Probe
  source 1..50: mol_type = other DNA

SEQ ID NO: 48980 - DNA, 46 bp, synthetic construct; identical to SEQ ID NO: 40752
  misc_feature 1..46: note = Probe
  source 1..46: mol_type = other DNA

SEQ ID NO: 48981 - DNA, 16 bp, synthetic construct
  misc_feature 1..16: note = Probe
  source 1..16: mol_type = other DNA
ggcccataccccgaaa

SEQ ID NO: 48982 - DNA, 17 bp, synthetic construct
  misc_feature 1..17: note = Probe
  source 1..17: mol_type = other DNA
ggcccataccccgaaaa

SEQ ID NO: 48983 - DNA, 19 bp, synthetic construct
  misc_feature 1..19: note = Probe
  source 1..19: mol_type = other DNA
ggcccataccccgaaaatg

SEQ ID NO: 48984 - DNA, 20 bp, synthetic construct
  misc_feature 1..20: note = Probe
  source 1..20: mol_type = other DNA
ggcccataccccgaaaatgt

SEQ ID NO: 48985 - DNA, 21 bp, synthetic construct
  misc_feature 1..21: note = Probe
  source 1..21: mol_type = other DNA
ggcccataccccgaaaatgtt

SEQ ID NO: 48986 - DNA, 22 bp, synthetic construct
  misc_feature 1..22: note = Probe
  source 1..22: mol_type = other DNA
ggcccataccccgaaaatgttg

SEQ ID NO: 48987 - DNA, 24 bp, synthetic construct
  misc_feature 1..24: note = Probe
  source 1..24: mol_type = other DNA
ggcccataccccgaaaatgttggt

SEQ ID NO: 48988 - DNA, 25 bp, synthetic construct
  misc_feature 1..25: note = Probe
  source 1..25: mol_type = other DNA
ggcccataccccgaaaatgttggtt

SEQ ID NO: 48989 - DNA, 26 bp, synthetic construct
  misc_feature 1..26: note = Probe
  source 1..26: mol_type = other DNA
ggcccataccccgaaaatgttggtta

SEQ ID NO: 48990 - DNA, 28 bp, synthetic construct
  misc_feature 1..28: note = Probe
  source 1..28: mol_type = other DNA
ggcccataccccgaaaatgttggttata

SEQ ID NO: 48991 - DNA, 29 bp, synthetic construct
  misc_feature 1..29: note = Probe
  source 1..29: mol_type = other DNA
ggcccataccccgaaaatgttggttatac

SEQ ID NO: 48992 - DNA, 30 bp, synthetic construct; identical to SEQ ID NO: 6411
  misc_feature 1..30: note = Probe
  source 1..30: mol_type = other DNA

SEQ ID NO: 48993 - DNA, 31 bp, synthetic construct; identical to SEQ ID NO: 6412
  misc_feature 1..31: note = Probe
  source 1..31: mol_type = other DNA

SEQ ID NO: 48994 - DNA, 32 bp, synthetic construct; identical to SEQ ID NO: 6413
  misc_feature 1..32: note = Probe
  source 1..32: mol_type = other DNA

SEQ ID NO: 48995 - DNA, 34 bp, synthetic construct; identical to SEQ ID NO: 6415
  misc_feature 1..34: note = Probe
  source 1..34: mol_type = other DNA

SEQ ID NO: 48996 - DNA, 35 bp, synthetic construct; identical to SEQ ID NO: 6416
  misc_feature 1..35: note = Probe
  source 1..35: mol_type = other DNA

SEQ ID NO: 48997 - DNA, 36 bp, synthetic construct; identical to SEQ ID NO: 6417
  misc_feature 1..36: note = Probe
  source 1..36: mol_type = other DNA

SEQ ID NO: 48998 - DNA, 37 bp, synthetic construct; identical to SEQ ID NO: 6418
  misc_feature 1..37: note = Probe
  source 1..37: mol_type = other DNA

SEQ ID NO: 48999 - DNA, 38 bp, synthetic construct; identical to SEQ ID NO: 21533
  misc_feature 1..38: note = Probe
  source 1..38: mol_type = other DNA

SEQ ID NO: 49000 - DNA, 43 bp, synthetic construct; identical to SEQ ID NO: 6420
  misc_feature 1..43: note = Probe
  source 1..43: mol_type = other DNA

SEQ ID NO: 49001 - DNA, 44 bp, synthetic construct; identical to SEQ ID NO: 6421
  misc_feature 1..44: note = Probe
  source 1..44: mol_type = other DNA

SEQ ID NO: 49002 - DNA, 45 bp, synthetic construct; identical to SEQ ID NO: 6422
  misc_feature 1..45: note = Probe
  source 1..45: mol_type = other DNA

SEQ ID NO: 49003 - DNA, 50 bp, synthetic construct
  misc_feature 1..50: note = Probe
  source 1..50: mol_type = other DNA
ggcccataccccgaaaatgttggttatacccttcccgtactaattaatcc

SEQ ID NO: 49004 - DNA, 40 bp, synthetic construct
  misc_feature 1..40: note = Probe
  source 1..40: mol_type = other DNA
ggccccaaaaattttggtgcaactccaaataaaagtaata

SEQ ID NO: 49005 - DNA, 32 bp, synthetic construct; identical to SEQ ID NO: 6423
  misc_feature 1..32: note = Probe
  source 1..32: mol_type = other DNA

SEQ ID NO: 49006 - DNA, 33 bp, synthetic construct; identical to SEQ ID NO: 6424
  misc_feature 1..33: note = Probe
  source 1..33: mol_type = other DNA

SEQ ID NO: 49007 - DNA, 35 bp, synthetic construct; identical to SEQ ID NO: 6425
  misc_feature 1..35: note = Probe
  source 1..35: mol_type = other DNA

SEQ ID NO: 49008 - DNA, 36 bp, synthetic construct; identical to SEQ ID NO: 1260
  misc_feature 1..36: note = Probe
  source 1..36: mol_type = other DNA

SEQ ID NO: 49009 - DNA, 50 bp, synthetic construct; identical to SEQ ID NO: 40759
  misc_feature 1..50: note = Probe
  source 1..50: mol_type = other DNA

SEQ ID NO: 49010 - DNA, 23 bp, synthetic construct
  misc_feature 1..23: note = Probe
  source 1..23: mol_type = other DNA
ggccccatggtgtaatggttagc

SEQ ID NO: 49011 - DNA, 31 bp, synthetic construct; identical to SEQ ID NO: 21540
  misc_feature 1..31: note = Probe
  source 1..31: mol_type = other DNA

SEQ ID NO: 49012 - DNA, 34 bp, synthetic construct; identical to SEQ ID NO: 13771
  misc_feature 1..34: note = Probe
  source 1..34: mol_type = other DNA

SEQ ID NO: 49013 - DNA, 35 bp, synthetic construct; identical to SEQ ID NO: 21542
  misc_feature 1..35: note = Probe
  source 1..35: mol_type = other DNA

SEQ ID NO: 49014 - DNA, 36 bp, synthetic construct; identical to SEQ ID NO: 1264
  misc_feature 1..36: note = Probe
  source 1..36: mol_type = other DNA

SEQ ID NO: 49015 - DNA, 37 bp, synthetic construct; identical to SEQ ID NO: 1265
  misc_feature 1..37: note = Probe
  source 1..37: mol_type = other DNA

SEQ ID NO: 49016 - DNA, 50 bp, synthetic construct; identical to SEQ ID NO: 6427
  misc_feature 1..50: note = Probe
  source 1..50: mol_type = other DNA

SEQ ID NO: 49017 - DNA, 28 bp, synthetic construct
  misc_feature 1..28: note = Probe
  source 1..28: mol_type = other DNA
ggccccgggttcaatccccggcacctcc

SEQ ID NO: 49018 - DNA, 29 bp, synthetic construct
  misc_feature 1..29: note = Probe
  source 1..29: mol_type = other DNA
ggccccgggttcaatccccggcatctcca

SEQ ID NO: 49019 - DNA, 32 bp, synthetic construct
  misc_feature 1..32: note = Probe
  source 1..32: mol_type = other DNA
ggccccgggttcaatccccggcatctccagac

SEQ ID NO: 49020 - DNA, 23 bp, synthetic construct
  misc_feature 1..23: note = Probe
  source 1..23: mol_type = other DNA
ggccccgggttcgatccccggca

SEQ ID NO: 49021 - DNA, 26 bp, synthetic construct
  misc_feature 1..26: note = Probe
  source 1..26: mol_type = other DNA
ggccccgggttcgatccccggcatct

SEQ ID NO: 49022 - DNA, 31 bp, synthetic construct; identical to SEQ ID NO: 21548
  misc_feature 1..31: note = Probe
  source 1..31: mol_type = other DNA

SEQ ID NO: 49023 - DNA, 32 bp, synthetic construct; identical to SEQ ID NO: 6430
  misc_feature 1..32: note = Probe
  source 1..32: mol_type = other DNA

SEQ ID NO: 49024 - DNA, 33 bp, synthetic construct; identical to SEQ ID NO: 21550
  misc_feature 1..33: note = Probe
  source 1..33: mol_type = other DNA

SEQ ID NO: 49025 - DNA, 34 bp, synthetic construct; identical to SEQ ID NO: 21551
  misc_feature 1..34: note = Probe
  source 1..34: mol_type = other DNA

SEQ ID NO: 49026 - DNA, 26 bp, synthetic construct
  misc_feature 1..26: note = Probe
  source 1..26: mol_type = other DNA
ggcccgggttcgactcccggtatggg

SEQ ID NO: 49027 - DNA, 31 bp, synthetic construct; identical to SEQ ID NO: 6431
  misc_feature 1..31: note = Probe
  source 1..31: mol_type = other DNA

SEQ ID NO: 49028 - DNA, 42 bp, synthetic construct; identical to SEQ ID NO: 21557
  misc_feature 1..42: note = Probe
  source 1..42: mol_type = other DNA

SEQ ID NO: 49029 - DNA, 27 bp, synthetic construct
  misc_feature 1..27: note = Probe
  source 1..27: mol_type = other DNA
ggcccgggttcgactcccggtgtggga

SEQ ID NO: 49030 - DNA, 29 bp, synthetic construct
  misc_feature 1..29: note = Probe
  source 1..29: mol_type = other DNA
ggcccgggttcgactcccggtgtgggaac

SEQ ID NO: 49031 - DNA, 31 bp, synthetic construct; identical to SEQ ID NO: 6432
  misc_feature 1..31: note = Probe
  source 1..31: mol_type = other DNA

SEQ ID NO: 49032 - DNA, 27 bp, synthetic construct
  misc_feature 1..27: note = Probe
  source 1..27: mol_type = other DNA
ggcccgggttcgattcccggtcaggga

SEQ ID NO: 49033 - DNA, 28 bp, synthetic construct
  misc_feature 1..28: note = Probe
  source 1..28: mol_type = other DNA
ggcccgggttcgattcccggtcagggaa

SEQ ID NO: 49034 - DNA, 31 bp, synthetic construct; identical to SEQ ID NO: 6433
  misc_feature 1..31: note = Probe
  source 1..31: mol_type = other DNA

SEQ ID NO: 49035 - DNA, 16 bp, synthetic construct
  misc_feature 1..16: note = Probe
  source 1..16: mol_type = other DNA
ggccctatagctcagg

SEQ ID NO: 49036 - DNA, 17 bp, synthetic construct
  misc_feature 1..17: note = Probe
  source 1..17: mol_type = other DNA
ggccctatagctcaggg

SEQ ID NO: 49037 - DNA, 18 bp, synthetic construct
  misc_feature 1..18: note = Probe
  source 1..18: mol_type = other DNA
ggccctatagctcagggg

SEQ ID NO: 49038 - DNA, 19 bp, synthetic construct
  misc_feature 1..19: note = Probe
  source 1..19: mol_type = other DNA
ggccctatagctcaggggt

SEQ ID NO: 49039 - DNA, 20 bp, synthetic construct
  misc_feature 1..20: note = Probe
  source 1..20: mol_type = other DNA
ggccctatagctcaggggtt

SEQ ID NO: 49040 - DNA, 35 bp, synthetic construct
  misc_feature 1..35: note = Probe
  source 1..35: mol_type = other DNA
ggccctatagctcaggggttagagcactggtcttg

SEQ ID NO: 49041 - DNA, 36 bp, synthetic construct; identical to SEQ ID NO: 1271
  misc_feature 1..36: note = Probe
  source 1..36: mol_type = other DNA

SEQ ID NO: 49042 - DNA, 50 bp, synthetic construct; identical to SEQ ID NO: 1272
  misc_feature 1..50: note = Probe
  source 1..50: mol_type = other DNA

SEQ ID NO: 49043 - DNA, 17 bp, synthetic construct
  misc_feature 1..17: note = Probe
  source 1..17: mol_type = other DNA
ggccgcgtggcctaatg

SEQ ID NO: 49044 - DNA, 31 bp, synthetic construct
  misc_feature 1..31: note = Probe
  source 1..31: mol_type = other DNA
ggccgcgtggcctaatggataaggcgtctga

SEQ ID NO: 49045 - DNA, 33 bp, synthetic construct
  misc_feature 1..33: note = Probe
  source 1..33: mol_type = other DNA
ggccgcgtggcctaatggataaggcgtctgatt

SEQ ID NO: 49046 - DNA, 16 bp, synthetic construct
  misc_feature 1..16: note = Probe
  source 1..16: mol_type = other DNA
ggccggttagctcagt

SEQ ID NO: 49047 - DNA, 19 bp, synthetic construct
  misc_feature 1..19: note = Probe
  source 1..19: mol_type = other DNA
ggccggttagctcagttgg

SEQ ID NO: 49048 - DNA, 20 bp, synthetic construct
  misc_feature 1..20: note = Probe
  source 1..20: mol_type = other DNA
ggccggttagctcagttggt

SEQ ID NO: 49049 - DNA, 21 bp, synthetic construct
  misc_feature 1..21: note = Probe
  source 1..21: mol_type = other DNA
ggccggttagctcagttggta

SEQ ID NO: 49050 - DNA, 22 bp, synthetic construct
  misc_feature 1..22: note = Probe
  source 1..22: mol_type = other DNA
ggccggttagctcagttggtaa

SEQ ID NO: 49051 - DNA, 21 bp, synthetic construct
  misc_feature 1..21: note = Probe
  source 1..21: mol_type = other DNA
ggccggttagctcagttggtt

SEQ ID NO: 49052 - DNA, 22 bp, synthetic construct
  misc_feature 1..22: note = Probe
  source 1..22: mol_type = other DNA
ggccggttagctcagttggtta

SEQ ID NO: 49053 - DNA, 24 bp, synthetic construct
  misc_feature 1..24: note = Probe
  source 1..24: mol_type = other DNA
ggccggttagctcagttggttaga

SEQ ID NO: 49054 - DNA, 26 bp, synthetic construct
  misc_feature 1..26: note = Probe
  source 1..26: mol_type = other DNA
ggccggttagctcagttggttagagc

SEQ ID NO: 49055 - DNA, 31 bp, synthetic construct; identical to SEQ ID NO: 40784
  misc_feature 1..31: note = Probe
  source 1..31: mol_type = other DNA

SEQ ID NO: 49056 - DNA, 32 bp, synthetic construct; identical to SEQ ID NO: 21581
  misc_feature 1..32: note = Probe
  source 1..32: mol_type = other DNA

SEQ ID NO: 49057 - DNA, 33 bp, synthetic construct; identical to SEQ ID NO: 6449
  misc_feature 1..33: note = Probe
  source 1..33: mol_type = other DNA

SEQ ID NO: 49058 - DNA, 34 bp, synthetic construct; identical to SEQ ID NO: 6450
  misc_feature 1..34: note = Probe
  source 1..34: mol_type = other DNA

SEQ ID NO: 49059 - DNA, 35 bp, synthetic construct; identical to SEQ ID NO: 21584
  misc_feature 1..35: note = Probe
  source 1..35: mol_type = other DNA

SEQ ID NO: 49060 - DNA, 37 bp, synthetic construct
  misc_feature 1..37: note = Probe
  source 1..37: mol_type = other DNA
ggccggttagctcagttggttagagcgtggtgctaat

SEQ ID NO: 49061 - DNA, 50 bp, synthetic construct
  misc_feature 1..50: note = Probe
  source 1..50: mol_type = other DNA
ggccggttagctcagttggttagagcgtggtgctaataacgccaaggtcg

SEQ ID NO: 49062 - DNA, 30 bp, synthetic construct
  misc_feature 1..30: note = Probe
  source 1..30: mol_type = other DNA
ggcctcgtggcgcaacggtagcgcgtctga

SEQ ID NO: 49063 - DNA, 24 bp, synthetic construct
  misc_feature 1..24: note = Probe
  source 1..24: mol_type = other DNA
ggcgcggtggccaagtggtaaggc

SEQ ID NO: 49064 - DNA, 28 bp, synthetic construct
  misc_feature 1..28: note = Probe
  source 1..28: mol_type = other DNA
ggcggcccgggttcgactcccggtgtgg

SEQ ID NO: 49065 - DNA, 29 bp, synthetic construct
  misc_feature 1..29: note = Probe
  source 1..29: mol_type = other DNA
ggcggcccgggttcgactcccggtgtggg

SEQ ID NO: 49066 - DNA, 30 bp, synthetic construct; identical to SEQ ID NO: 1278
  misc_feature 1..30: note = Probe
  source 1..30: mol_type = other DNA

SEQ ID NO: 49067 - DNA, 31 bp, synthetic construct; identical to SEQ ID NO: 1279
  misc_feature 1..31: note = Probe
  source 1..31: mol_type = other DNA

SEQ ID NO: 49068 - DNA, 18 bp, synthetic construct
  misc_feature 1..18: note = Probe
  source 1..18: mol_type = other DNA
ggcgtgattcataccttt

SEQ ID NO: 49069 - DNA, 19 bp, synthetic construct
  misc_feature 1..19: note = Probe
  source 1..19: mol_type = other DNA
ggcgtgattcatacctttt

SEQ ID NO: 49070 - DNA, 16 bp, synthetic construct
  misc_feature 1..16: note = Probe
  source 1..16: mol_type = other DNA
ggctaaatcctatata

SEQ ID NO: 49071 - DNA, 18 bp, synthetic construct
  misc_feature 1..18: note = Probe
  source 1..18: mol_type = other DNA
ggctaaatcctatatatc

SEQ ID NO: 49072 - DNA, 24 bp, synthetic construct
  misc_feature 1..24: note = Probe
  source 1..24: mol_type = other DNA
ggctaaatcctatatatcttaatg

SEQ ID NO: 49073 - DNA, 27 bp, synthetic construct
  misc_feature 1..27: note = Probe
  source 1..27: mol_type = other DNA
ggctagctcagtcggtagagcatgaga

SEQ ID NO: 49074 - DNA, 28 bp, synthetic construct
  misc_feature 1..28: note = Probe
  source 1..28: mol_type = other DNA
ggctagctcagtcggtagagcatgagac

SEQ ID NO: 49075 - DNA, 29 bp, synthetic construct
  misc_feature 1..29: note = Probe
  source 1..29: mol_type = other DNA
ggctagctcagtcggtagagcatgagact

SEQ ID NO: 49076 - DNA, 31 bp, synthetic construct; identical to SEQ ID NO: 1286
  misc_feature 1..31: note = Probe
  source 1..31: mol_type = other DNA

SEQ ID NO: 49077 - DNA, 28 bp, synthetic construct
  misc_feature 1..28: note = Probe
  source 1..28: mol_type = other DNA
ggctagctcagtcggtagagcatgggac

SEQ ID NO: 49078 - DNA, 29 bp, synthetic construct
  misc_feature 1..29: note = Probe
  source 1..29: mol_type = other DNA
ggctagctcagtcggtagagcatgggact

SEQ ID NO: 49079 - DNA, 31 bp, synthetic construct; identical to SEQ ID NO: 1293
  misc_feature 1..31: note = Probe
  source 1..31: mol_type = other DNA

SEQ ID NO: 49080 - DNA, 32 bp, synthetic construct; identical to SEQ ID NO: 1294
  misc_feature 1..32: note = Probe
  source 1..32: mol_type = other DNA

SEQ ID NO: 49081 - DNA, 16 bp, synthetic construct
  misc_feature 1..16: note = Probe
  source 1..16: mol_type = other DNA
ggctcacatcacccca

SEQ ID NO: 49082 - DNA, 17 bp, synthetic construct
  misc_feature 1..17: note = Probe
  source 1..17: mol_type = other DNA
ggctcacatcaccccat

SEQ ID NO: 49083 - DNA, 18 bp, synthetic construct
  misc_feature 1..18: note = Probe
  source 1..18: mol_type = other DNA
ggctcacatcaccccata

SEQ ID NO: 49084 - DNA, 19 bp, synthetic construct
  misc_feature 1..19: note = Probe
  source 1..19: mol_type = other DNA
ggctcacatcaccccataa

SEQ ID NO: 49085 - DNA, 20 bp, synthetic construct
  misc_feature 1..20: note = Probe
  source 1..20: mol_type = other DNA
ggctcacatcaccccataaa

SEQ ID NO: 49086 - DNA, 21 bp, synthetic construct
  misc_feature 1..21: note = Probe
  source 1..21: mol_type = other DNA
ggctcacatcaccccataaac

SEQ ID NO: 49087 - DNA, 22 bp, synthetic construct
  misc_feature 1..22: note = Probe
  source 1..22: mol_type = other DNA
ggctcacatcaccccataaaca

SEQ ID NO: 49088 - DNA, 23 bp, synthetic construct
  misc_feature 1..23: note = Probe
  source 1..23: mol_type = other DNA
ggctcacatcaccccataaacaa

SEQ ID NO: 49089 - DNA, 24 bp, synthetic construct
  misc_feature 1..24: note = Probe
  source 1..24: mol_type = other DNA
ggctcacatcaccccataaacaaa

SEQ ID NO: 49090 - DNA, 25 bp, synthetic construct
  misc_feature 1..25: note = Probe
  source 1..25: mol_type = other DNA
ggctcacatcaccccataaacaaat

SEQ ID NO: 49091 - DNA, 26 bp, synthetic construct
  misc_feature 1..26: note = Probe
  source 1..26: mol_type = other DNA
ggctcacatcaccccataaacaaata

SEQ ID NO: 49092 - DNA, 16 bp, synthetic construct
  misc_feature 1..16: note = Probe
  source 1..16: mol_type = other DNA
ggctccatagctcagg

SEQ ID NO: 49093 - DNA, 17 bp, synthetic construct
  misc_feature 1..17: note = Probe
  source 1..17: mol_type = other DNA
ggctccatagctcaggg

SEQ ID NO: 49094 - DNA, 18 bp, synthetic construct
  misc_feature 1..18: note = Probe
  source 1..18: mol_type = other DNA
ggctccatagctcagggg

SEQ ID NO: 49095 - DNA, 19 bp, synthetic construct
  misc_feature 1..19: note = Probe
  source 1..19: mol_type = other DNA
ggctccatagctcaggggt

SEQ ID NO: 49096 - DNA, 20 bp, synthetic construct
  misc_feature 1..20: note = Probe
  source 1..20: mol_type = other DNA
ggctccatagctcaggggtt

SEQ ID NO: 49097 - DNA, 30 bp, synthetic construct; identical to SEQ ID NO: 10696
  misc_feature 1..30: note = Probe
  source 1..30: mol_type = other DNA

SEQ ID NO: 49098 - DNA, 31 bp, synthetic construct; identical to SEQ ID NO: 6482
  misc_feature 1..31: note = Probe
  source 1..31: mol_type = other DNA

SEQ ID NO: 49099 - DNA, 32 bp, synthetic construct; identical to SEQ ID NO: 6483
  misc_feature 1..32: note = Probe
  source 1..32: mol_type = other DNA

SEQ ID NO: 49100 - DNA, 33 bp, synthetic construct; identical to SEQ ID NO: 6484
  misc_feature 1..33: note = Probe
  source 1..33: mol_type = other DNA

SEQ ID NO: 49101 - DNA, 34 bp, synthetic construct; identical to SEQ ID NO: 6485
  misc_feature 1..34: note = Probe
  source 1..34: mol_type = other DNA

SEQ ID NO: 49102 - DNA, 36 bp, synthetic construct; identical to SEQ ID NO: 6487
  misc_feature 1..36: note = Probe
  source 1..36: mol_type = other DNA

SEQ ID NO: 49103 - DNA, 18 bp, synthetic construct
  misc_feature 1..18: note = Probe
  source 1..18: mol_type = other DNA
ggctccatagctcagtgg

SEQ ID NO: 49104 - DNA, 25 bp, synthetic construct
  misc_feature 1..25: note = Probe
  source 1..25: mol_type = other DNA
ggctccatagctcagtggttagagc

SEQ ID NO: 49105 - DNA, 33 bp, synthetic construct; identical to SEQ ID NO: 1300
  misc_feature 1..33: note = Probe
  source 1..33: mol_type = other DNA

SEQ ID NO: 49106 - DNA, 26 bp, synthetic construct
  misc_feature 1..26: note = Probe
  source 1..26: mol_type = other DNA
ggctccgtagcttagttggttaaagc

SEQ ID NO: 49107 - DNA, 19 bp, synthetic construct
  misc_feature 1..19: note = Probe
  source 1..19: mol_type = other DNA
ggctccgtggcgcaatgga

SEQ ID NO: 49108 - DNA, 30 bp, synthetic construct; identical to SEQ ID NO: 10704
  misc_feature 1..30: note = Probe
  source 1..30: mol_type = other DNA

SEQ ID NO: 49109 - DNA, 31 bp, synthetic construct; identical to SEQ ID NO: 21644
  misc_feature 1..31: note = Probe
  source 1..31: mol_type = other DNA

SEQ ID NO: 49110 - DNA, 26 bp, synthetic construct
  misc_feature 1..26: note = Probe
  source 1..26: mol_type = other DNA
ggctccgtggcttagctggttaaagc

SEQ ID NO: 49111 - DNA, 27 bp, synthetic construct
  misc_feature 1..27: note = Probe
  source 1..27: mol_type = other DNA
ggctcgttggtctaggggtatgattct

SEQ ID NO: 49112 - DNA, 29 bp, synthetic construct
  misc_feature 1..29: note = Probe
  source 1..29: mol_type = other DNA
ggctcgttggtctaggggtatgattctcg

SEQ ID NO: 49113 - DNA, 30 bp, synthetic construct; identical to SEQ ID NO: 6496
  misc_feature 1..30: note = Probe
  source 1..30: mol_type = other DNA

SEQ ID NO: 49114 - DNA, 31 bp, synthetic construct; identical to SEQ ID NO: 6497
  misc_feature 1..31: note = Probe
  source 1..31: mol_type = other DNA

SEQ ID NO: 49115 - DNA, 32 bp, synthetic construct; identical to SEQ ID NO: 6498
  misc_feature 1..32: note = Probe
  source 1..32: mol_type = other DNA

SEQ ID NO: 49116 - DNA, 33 bp, synthetic construct; identical to SEQ ID NO: 1306
  misc_feature 1..33: note = Probe
  source 1..33: mol_type = other DNA

SEQ ID NO: 49117 - DNA, 33 bp, synthetic construct; identical to SEQ ID NO: 1307
  misc_feature 1..33: note = Probe
  source 1..33: mol_type = other DNA

SEQ ID NO: 49118 - DNA, 30 bp, synthetic construct; identical to SEQ ID NO: 8665
  misc_feature 1..30: note = Probe
  source 1..30: mol_type = other DNA

SEQ ID NO: 49119 - DNA, 32 bp, synthetic construct; identical to SEQ ID NO: 1308
  misc_feature 1..32: note = Probe
  source 1..32: mol_type = other DNA

SEQ ID NO: 49120 - DNA, 33 bp, synthetic construct; identical to SEQ ID NO: 6503
  misc_feature 1..33: note = Probe
  source 1..33: mol_type = other DNA

SEQ ID NO: 49121 - DNA, 31 bp, synthetic construct
  misc_feature 1..31: note = Probe
  source 1..31: mol_type = other DNA
ggctctgtggcgcaatggatagcgcattgga

SEQ ID NO: 49122 - DNA, 32 bp, synthetic construct; identical to SEQ ID NO: 37060
  misc_feature 1..32: note = Probe
  source 1..32: mol_type = other DNA

SEQ ID NO: 49123 - DNA, 27 bp, synthetic construct
  misc_feature 1..27: note = Probe
  source 1..27: mol_type = other DNA
ggctgcgtgttcgaatcacgtcggggt

SEQ ID NO: 49124 - DNA, 29 bp, synthetic construct
  misc_feature 1..29: note = Probe
  source 1..29: mol_type = other DNA
ggctgcgtgttcgaatcacgtcggggtca

SEQ ID NO: 49125 - DNA, 32 bp, synthetic construct; identical to SEQ ID NO: 6504
  misc_feature 1..32: note = Probe
  source 1..32: mol_type = other DNA

SEQ ID NO: 49126 - DNA, 32 bp, synthetic construct; identical to SEQ ID NO: 6505
  misc_feature 1..32: note = Probe
  source 1..32: mol_type = other DNA

SEQ ID NO: 49127 - DNA, 21 bp, synthetic construct
  misc_feature 1..21: note = Probe
  source 1..21: mol_type = other DNA
ggctgtgatggccgagtggtt

SEQ ID NO: 49128 - DNA, 40 bp, synthetic construct
  misc_feature 1..40: note = Probe
  source 1..40: mol_type = other DNA
ggctgttaaccgaaaggttggtggttcgagcccacccagg

SEQ ID NO: 49129 - DNA, 44 bp, synthetic construct
  misc_feature 1..44: note = Probe
  source 1..44: mol_type = other DNA
ggctgttaaccgaaaggttggtggttcgagcccacccagggacg

SEQ ID NO: 49130 - DNA, 45 bp, synthetic construct
  misc_feature 1..45: note = Probe
  source 1..45: mol_type = other DNA
ggctgttaaccgaaaggttggtggttcgagcccacccagggacgc

SEQ ID NO: 49131 - DNA, 50 bp, synthetic construct; identical to SEQ ID NO: 40844
  misc_feature 1..50: note = Probe
  source 1..50: mol_type = other DNA

SEQ ID NO: 49132 - DNA, 22 bp, synthetic construct
  misc_feature 1..22: note = Probe
  source 1..22: mol_type = other DNA
ggcttacgaccccttatttacc

SEQ ID NO: 49133 - DNA, 23 bp, synthetic construct
  misc_feature 1..23: note = Probe
  source 1..23: mol_type = other DNA
ggcttacgaccccttatttaccg

SEQ ID NO: 49134 - DNA, 26 bp, synthetic construct
  misc_feature 1..26: note = Probe
  source 1..26: mol_type = other DNA
gggagaccggggttcaattccccgac

SEQ ID NO: 49135 - DNA, 29 bp, synthetic construct
  misc_feature 1..29: note = Probe
  source 1..29: mol_type = other DNA
gggagaccggggttcaattccccgacggg

SEQ ID NO: 49136 - DNA, 32 bp, synthetic construct; identical to SEQ ID NO: 6509
  misc_feature 1..32: note = Probe
  source 1..32: mol_type = other DNA

SEQ ID NO: 49137 - DNA, 32 bp, synthetic construct; identical to SEQ ID NO: 21696
  misc_feature 1..32: note = Probe
  source 1..32: mol_type = other DNA

SEQ ID NO: 49138 - DNA, 35 bp, synthetic construct; identical to SEQ ID NO: 6512
  misc_feature 1..35: note = Probe
  source 1..35: mol_type = other DNA

SEQ ID NO: 49139 - DNA, 26 bp, synthetic construct
  misc_feature 1..26: note = Probe
  source 1..26: mol_type = other DNA
gggagaccggggttcgattccccgac

SEQ ID NO: 49140 - DNA, 27 bp, synthetic construct
  misc_feature 1..27: note = Probe
  source 1..27: mol_type = other DNA
gggagaccggggttcgattccccgacg

SEQ ID NO: 49141 - DNA, 28 bp, synthetic construct
  misc_feature 1..28: note = Probe
  source 1..28: mol_type = other DNA
gggagaccggggttcgattccccgacgg

SEQ ID NO: 49142 - DNA, 30 bp, synthetic construct; identical to SEQ ID NO: 1315
  misc_feature 1..30: note = Probe
  source 1..30: mol_type = other DNA

SEQ ID NO: 49143 - DNA, 33 bp, synthetic construct; identical to SEQ ID NO: 6516
  misc_feature 1..33: note = Probe
  source 1..33: mol_type = other DNA

SEQ ID NO: 49144 - DNA, 35 bp, synthetic construct; identical to SEQ ID NO: 6518
  misc_feature 1..35: note = Probe
  source 1..35: mol_type = other DNA

SEQ ID NO: 49145 - DNA, 33 bp, synthetic construct; identical to SEQ ID NO: 6519
  misc_feature 1..33: note = Probe
  source 1..33: mol_type = other DNA

SEQ ID NO: 49146 - DNA, 35 bp, synthetic construct; identical to SEQ ID NO: 6520
  misc_feature 1..35: note = Probe
  source 1..35: mol_type = other DNA

SEQ ID NO: 49147 - DNA, 35 bp, synthetic construct; identical to SEQ ID NO: 6521
  misc_feature 1..35: note = Probe
  source 1..35: mol_type = other DNA

SEQ ID NO: 49148 - DNA, 35 bp, synthetic construct; identical to SEQ ID NO: 21721
  misc_feature 1..35: note = Probe
  source 1..35: mol_type = other DNA

SEQ ID NO: 49149 - DNA, 36 bp, synthetic construct; identical to SEQ ID NO: 21722
  misc_feature 1..36: note = Probe
  source 1..36: mol_type = other DNA

SEQ ID NO: 49150 - DNA, 39 bp, synthetic construct; identical to SEQ ID NO: 21725
  misc_feature 1..39: note = Probe
  source 1..39: mol_type = other DNA

SEQ ID NO: 49151 - DNA, 40 bp, synthetic construct; identical to SEQ ID NO: 21726
  misc_feature 1..40: note = Probe
  source 1..40: mol_type = other DNA

SEQ ID NO: 49152 - DNA, 41 bp, synthetic construct; identical to SEQ ID NO: 21727
  misc_feature 1..41: note = Probe
  source 1..41: mol_type = other DNA

SEQ ID NO: 49153 - DNA, 37 bp, synthetic construct; identical to SEQ ID NO: 21739
  misc_feature 1..37: note = Probe
  source 1..37: mol_type = other DNA

SEQ ID NO: 49154 - DNA, 38 bp, synthetic construct; identical to SEQ ID NO: 21740
  misc_feature 1..38: note = Probe
  source 1..38: mol_type = other DNA

SEQ ID NO: 49155 - DNA, 39 bp, synthetic construct; identical to SEQ ID NO: 6522
  misc_feature 1..39: note = Probe
  source 1..39: mol_type = other DNA

SEQ ID NO: 49156 - DNA, 41 bp, synthetic construct; identical to SEQ ID NO: 21743
  misc_feature 1..41: note = Probe
  source 1..41: mol_type = other DNA

SEQ ID NO: 49157 - DNA, 42 bp, synthetic construct; identical to SEQ ID NO: 21744
  misc_feature 1..42: note = Probe
  source 1..42: mol_type = other DNA

SEQ ID NO: 49158 - DNA, 43 bp, synthetic construct; identical to SEQ ID NO: 21745
  misc_feature 1..43: note = Probe
  source 1..43: mol_type = other DNA

SEQ ID NO: 49159 - DNA, 32 bp, synthetic construct; identical to SEQ ID NO: 6526
  misc_feature 1..32: note = Probe
  source 1..32: mol_type = other DNA

SEQ ID NO: 49160 - DNA, 40 bp, synthetic construct; identical to SEQ ID NO: 21777
  misc_feature 1..40: note = Probe
  source 1..40: mol_type = other DNA

SEQ ID NO: 49161 - DNA, 50 bp, synthetic construct; identical to SEQ ID NO: 21782
  misc_feature 1..50: note = Probe
  source 1..50: mol_type = other DNA

SEQ ID NO: 49162 - DNA, 23 bp, synthetic construct
  misc_feature 1..23: note = Probe
  source 1..23: mol_type = other DNA
gggatcgatgcccgcatcctcca

SEQ ID NO: 49163 - DNA, 26 bp, synthetic construct
  misc_feature 1..26: note = Probe
  source 1..26: mol_type = other DNA
gggatcgatgcccgcattctccatac

SEQ ID NO: 49164 - DNA, 22 bp, synthetic construct
  misc_feature 1..22: note = Probe
  source 1..22: mol_type = other DNA
gggatgggttcgattctcatag

SEQ ID NO: 49165 - DNA, 23 bp, synthetic construct
  misc_feature 1..23: note = Probe
  source 1..23: mol_type = other DNA
gggatgggttcgattctcatagt

SEQ ID NO: 49166 - DNA, 24 bp, synthetic construct
  misc_feature 1..24: note = Probe
  source 1..24: mol_type = other DNA
gggatgggttcgattctcatagtc

SEQ ID NO: 49167 - DNA, 27 bp, synthetic construct
  misc_feature 1..27: note = Probe
  source 1..27: mol_type = other DNA
gggatgggttcgattctcatagtccta

SEQ ID NO: 49168 - DNA, 31 bp, synthetic construct; identical to SEQ ID NO: 6530
  misc_feature 1..31: note = Probe
  source 1..31: mol_type = other DNA

SEQ ID NO: 49169 - DNA, 24 bp, synthetic construct
  misc_feature 1..24: note = Probe
  source 1..24: mol_type = other DNA
gggattgtgggttcgagtcccatc

SEQ ID NO: 49170 - DNA, 27 bp, synthetic construct
  misc_feature 1..27: note = Probe
  source 1..27: mol_type = other DNA
gggattgtgggttcgagtcccatctgg

SEQ ID NO: 49171 - DNA, 28 bp, synthetic construct
  misc_feature 1..28: note = Probe
  source 1..28: mol_type = other DNA
gggattgtgggttcgagtcccatctggg

SEQ ID NO: 49172 - DNA, 29 bp, synthetic construct
  misc_feature 1..29: note = Probe
  source 1..29: mol_type = other DNA
gggattgtgggttcgagtcccatctgggg

SEQ ID NO: 49173 - DNA, 31 bp, synthetic construct; identical to SEQ ID NO: 6534
  misc_feature 1..31: note = Probe
  source 1..31: mol_type = other DNA

SEQ ID NO: 49174 - DNA, 32 bp, synthetic construct
  misc_feature 1..32: note = Probe
  source 1..32: mol_type = other DNA
gggattgtgggttcgagtcccatctggggtgg

SEQ ID NO: 49175 - DNA, 31 bp, synthetic construct; identical to SEQ ID NO: 6536
  misc_feature 1..31: note = Probe
  source 1..31: mol_type = other DNA

SEQ ID NO: 49176 - DNA, 32 bp, synthetic construct
  misc_feature 1..32: note = Probe
  source 1..32: mol_type = other DNA
gggattgtgggttcgagtcccatctgggtcgc

SEQ ID NO: 49177 - DNA, 19 bp, synthetic construct
  misc_feature 1..19: note = Probe
  source 1..19: mol_type = other DNA
gggccagtggcgcaatgga

SEQ ID NO: 49178 - DNA, 33 bp, synthetic construct; identical to SEQ ID NO: 32392
  misc_feature 1..33: note = Probe
  source 1..33: mol_type = other DNA

SEQ ID NO: 49179 - DNA, 50 bp, synthetic construct
  misc_feature 1..50: note = Probe
  source 1..50: mol_type = other DNA
gggcccataacccagaggtcgatggatcgaaaccatcctctgctagggag

SEQ ID NO: 49180 - DNA, 50 bp, synthetic construct
  misc_feature 1..50: note = Probe
  source 1..50: mol_type = other DNA
gggcccataacccagaggtcgatggatcgaaaccatcctctgctaggtcc

SEQ ID NO: 49181 - DNA, 49 bp, synthetic construct
  misc_feature 1..49: note = Probe
  source 1..49: mol_type = other DNA
gggcccataacccagaggtcgatggatcgaaaccatcctctgctaggtg

SEQ ID NO: 49182 - DNA, 50 bp, synthetic construct; identical to SEQ ID NO: 6540
  misc_feature 1..50: note = Probe
  source 1..50: mol_type = other DNA

SEQ ID NO: 49183 - DNA, 49 bp, synthetic construct
  misc_feature 1..49: note = Probe
  source 1..49: mol_type = other DNA
gggcccataacccagaggtcgatggatcgaaaccatcctctgctatcgg

SEQ ID NO: 49184 - DNA, 50 bp, synthetic construct
  misc_feature 1..50: note = Probe
  source 1..50: mol_type = other DNA
gggcccataacccagaggtcgatggatcgaaaccatcctctgctattttt

SEQ ID NO: 49185 - DNA, 26 bp, synthetic construct
  misc_feature 1..26: note = Probe
  source 1..26: mol_type = other DNA
gggcccataccccgaaaatgttggtt

SEQ ID NO: 49186 - DNA, 32 bp, synthetic construct; identical to SEQ ID NO: 6550
  misc_feature 1..32: note = Probe
  source 1..32: mol_type = other DNA

SEQ ID NO: 49187 - DNA, 36 bp, synthetic construct; identical to SEQ ID NO: 21810
  misc_feature 1..36: note = Probe
  source 1..36: mol_type = other DNA

SEQ ID NO: 49188 - DNA, 40 bp, synthetic construct; identical to SEQ ID NO: 6555
  misc_feature 1..40: note = Probe
  source 1..40: mol_type = other DNA

SEQ ID NO: 49189 - DNA, 43 bp, synthetic construct
  misc_feature 1..43: note = Probe
  source 1..43: mol_type = other DNA
gggcccataccccgaaaatgttggttatacccttcccgtacta

SEQ ID NO: 49190 - DNA, 45 bp, synthetic construct; identical to SEQ ID NO: 6557
  misc_feature 1..45: note = Probe
  source 1..45: mol_type = other DNA

SEQ ID NO: 49191 - DNA, 46 bp, synthetic construct; identical to SEQ ID NO: 6558
  misc_feature 1..46: note = Probe
  source 1..46: mol_type = other DNA

SEQ ID NO: 49192 - DNA, 32 bp, synthetic construct
  misc_feature 1..32: note = Probe
  source 1..32: mol_type = other DNA
gggcgtgggttcgaatcccaccgctgccaggt

SEQ ID NO: 49193 - DNA, 17 bp, synthetic construct
  misc_feature 1..17: note = Probe
  source 1..17: mol_type = other DNA
gggctcacatcacccca

SEQ ID NO: 49194 - DNA, 19 bp, synthetic construct
  misc_feature 1..19: note = Probe
  source 1..19: mol_type = other DNA
gggctcacatcaccccata

SEQ ID NO: 49195 - DNA, 20 bp, synthetic construct
  misc_feature 1..20: note = Probe
  source 1..20: mol_type = other DNA
gggctcacatcaccccataa

SEQ ID NO: 49196 - DNA, 23 bp, synthetic construct
  misc_feature 1..23: note = Probe
  source 1..23: mol_type = other DNA
gggctcacatcaccccataaaca

SEQ ID NO: 49197 - DNA, 25 bp, synthetic construct
  misc_feature 1..25: note = Probe
  source 1..25: mol_type = other DNA
gggctcacatcaccccataaacaaa

SEQ ID NO: 49198 - DNA, 26 bp, synthetic construct
  misc_feature 1..26: note = Probe
  source 1..26: mol_type = other DNA
gggctcacatcaccccataaacaaat

SEQ ID NO: 49199 - DNA, 20 bp, synthetic construct
  misc_feature 1..20: note = Probe
  source 1..20: mol_type = other DNA
ggggaattagctcaaatggt

SEQ ID NO: 49200 - DNA, 25 bp, synthetic construct
  misc_feature 1..25: note = Probe
  source 1..25: mol_type = other DNA
ggggaattagctcaaatggtagagc

SEQ ID NO: 49201 - DNA, 31 bp, synthetic construct
  misc_feature 1..31: note = Probe
  source 1..31: mol_type = other DNA
ggggaattagctcaaatggtagagcgctcgc

SEQ ID NO: 49202 - DNA, 32 bp, synthetic construct
  misc_feature 1..32: note = Probe
  source 1..32: mol_type = other DNA
ggggaattagctcaaatggtagagcgctcgct

SEQ ID NO: 49203 - DNA, 27 bp, synthetic construct
  misc_feature 1..27: note = Probe
  source 1..27: mol_type = other DNA
ggggacgcgttggtggtgtagtggtga

SEQ ID NO: 49204 - DNA, 50 bp, synthetic construct; identical to SEQ ID NO: 21843
  misc_feature 1..50: note = Probe
  source 1..50: mol_type = other DNA

SEQ ID NO: 49205 - DNA, 32 bp, synthetic construct; identical to SEQ ID NO: 6569
  misc_feature 1..32: note = Probe
  source 1..32: mol_type = other DNA

SEQ ID NO: 49206 - DNA, 34 bp, synthetic construct
  misc_feature 1..34: note = Probe
  source 1..34: mol_type = other DNA
ggggatatagctcaggggtagagcatttgactgc

SEQ ID NO: 49207 - DNA, 29 bp, synthetic construct
  misc_feature 1..29: note = Probe
  source 1..29: mol_type = other DNA
ggggatgtagctcagtggtagagcgcatg

SEQ ID NO: 49208 - DNA, 33 bp, synthetic construct; identical to SEQ ID NO: 6572
  misc_feature 1..33: note = Probe
  source 1..33: mol_type = other DNA

SEQ ID NO: 49209 - DNA, 34 bp, synthetic construct; identical to SEQ ID NO: 21855
  misc_feature 1..34: note = Probe
  source 1..34: mol_type = other DNA

SEQ ID NO: 49210 - DNA, 35 bp, synthetic construct; identical to SEQ ID NO: 1339
  misc_feature 1..35: note = Probe
  source 1..35: mol_type = other DNA

SEQ ID NO: 49211 - DNA, 27 bp, synthetic construct
  misc_feature 1..27: note = Probe
  source 1..27: mol_type = other DNA
ggggatgtagctcagtggtagagcgcg

SEQ ID NO: 49212 - DNA, 29 bp, synthetic construct
  misc_feature 1..29: note = Probe
  source 1..29: mol_type = other DNA
ggggatgtagctcagtggtagagcgcgcg

SEQ ID NO: 49213 - DNA, 33 bp, synthetic construct; identical to SEQ ID NO: 6573
  misc_feature 1..33: note = Probe
  source 1..33: mol_type = other DNA

SEQ ID NO: 49214 - DNA, 25 bp, synthetic construct
  misc_feature 1..25: note = Probe
  source 1..25: mol_type = other DNA
ggggattgtgggttcgagtcccatc

SEQ ID NO: 49215 - DNA, 28 bp, synthetic construct
  misc_feature 1..28: note = Probe
  source 1..28: mol_type = other DNA
ggggattgtgggttcgagtcccatctgg

SEQ ID NO: 49216 - DNA, 31 bp, synthetic construct
  misc_feature 1..31: note = Probe
  source 1..31: mol_type = other DNA
ggggcatagctcagtggtagagcatttgact

SEQ ID NO: 49217 - DNA, 16 bp, synthetic construct
  misc_feature 1..16: note = Probe
  source 1..16: mol_type = other DNA
gggggattagctcaaa

SEQ ID NO: 49218 - DNA, 32 bp, synthetic construct; identical to SEQ ID NO: 6576
  misc_feature 1..32: note = Probe
  source 1..32: mol_type = other DNA

SEQ ID NO: 49219 - DNA, 33 bp, synthetic construct; identical to SEQ ID NO: 6577
  misc_feature 1..33: note = Probe
  source 1..33: mol_type = other DNA

SEQ ID NO: 49220 - DNA, 19 bp, synthetic construct
  misc_feature 1..19: note = Probe
  source 1..19: mol_type = other DNA
gggggcatagctcagtggt

SEQ ID NO: 49221 - DNA, 23 bp, synthetic construct
  misc_feature 1..23: note = Probe
  source 1..23: mol_type = other DNA
gggggcatagctcagtggtagag

SEQ ID NO: 49222 - DNA, 32 bp, synthetic construct
  misc_feature 1..32: note = Probe
  source 1..32: mol_type = other DNA
gggggtatagctcacaggtagagcatttgact

SEQ ID NO: 49223 - DNA, 18 bp, synthetic construct
  misc_feature 1..18: note = Probe
  source 1..18: mol_type = other DNA
gggggtatagctcagggg

SEQ ID NO: 49224 - DNA, 32 bp, synthetic construct; identical to SEQ ID NO: 6582
  misc_feature 1..32: note = Probe
  source 1..32: mol_type = other DNA

SEQ ID NO: 49225 - DNA, 33 bp, synthetic construct; identical to SEQ ID NO: 21881
  misc_feature 1..33: note = Probe
  source 1..33: mol_type = other DNA

SEQ ID NO: 49226 - DNA, 34 bp, synthetic construct
  misc_feature 1..34: note = Probe
  source 1..34: mol_type = other DNA
gggggtatagctcaggggtagagcacttgactgc

SEQ ID NO: 49227 - DNA, 27 bp, synthetic construct
  misc_feature 1..27: note = Probe
  source 1..27: mol_type = other DNA
gggggtatagctcaggggtagagcatt

SEQ ID NO: 49228 - DNA, 35 bp, synthetic construct
  misc_feature 1..35: note = Probe
  source 1..35: mol_type = other DNA
gggggtatagctcaggggtagagcatttgactgca

SEQ ID NO: 49229 - DNA, 35 bp, synthetic construct; identical to SEQ ID NO: 6586
  misc_feature 1..35: note = Probe
  source 1..35: mol_type = other DNA

SEQ ID NO: 49230 - DNA, 16 bp, synthetic construct
  misc_feature 1..16: note = Probe
  source 1..16: mol_type = other DNA
gggggtatagctcagt

SEQ ID NO: 49231 - DNA, 17 bp, synthetic construct
  misc_feature 1..17: note = Probe
  source 1..17: mol_type = other DNA
gggggtatagctcagtg

SEQ ID NO: 49232 - DNA, 18 bp, synthetic construct
  misc_feature 1..18: note = Probe
  source 1..18: mol_type = other DNA
gggggtatagctcagtgg

SEQ ID NO: 49233 - DNA, 32 bp, synthetic construct; identical to SEQ ID NO: 21896
  misc_feature 1..32: note = Probe
  source 1..32: mol_type = other DNA

SEQ ID NO: 49234 - DNA, 36 bp, synthetic construct; identical to SEQ ID NO: 13863
  misc_feature 1..36: note = Probe
  source 1..36: mol_type = other DNA

SEQ ID NO: 49235 - DNA, 19 bp, synthetic construct
  misc_feature 1..19: note = Probe
  source 1..19: mol_type = other DNA
gggggtatagctcagtggt

SEQ ID NO: 49236 - DNA, 20 bp, synthetic construct
  misc_feature 1..20: note = Probe
  source 1..20: mol_type = other DNA
gggggtatagctcagtggta

SEQ ID NO: 49237 - DNA, 21 bp, synthetic construct
  misc_feature 1..21: note = Probe
  source 1..21: mol_type = other DNA
gggggtatagctcagtggtag

SEQ ID NO: 49238 - DNA, 22 bp, synthetic construct
  misc_feature 1..22: note = Probe
  source 1..22: mol_type = other DNA
gggggtatagctcagtggtaga

SEQ ID NO: 49239 - DNA, 23 bp, synthetic construct
  misc_feature 1..23: note = Probe
  source 1..23: mol_type = other DNA
gggggtatagctcagtggtagag

SEQ ID NO: 49240 - DNA, 24 bp, synthetic construct
  misc_feature 1..24: note = Probe
  source 1..24: mol_type = other DNA
gggggtatagctcagtggtagagc

SEQ ID NO: 49241 - DNA, 25 bp, synthetic construct
  misc_feature 1..25: note = Probe
  source 1..25: mol_type = other DNA
gggggtatagctcagtggtagagca

SEQ ID NO: 49242 - DNA, 27 bp, synthetic construct
  misc_feature 1..27: note = Probe
  source 1..27: mol_type = other DNA
gggggtatagctcagtggtagagcatt

SEQ ID NO: 49243 - DNA, 28 bp, synthetic construct
  misc_feature 1..28: note = Probe
  source 1..28: mol_type = other DNA
gggggtatagctcagtggtagagcattt

SEQ ID NO: 49244 - DNA, 29 bp, synthetic construct
  misc_feature 1..29: note = Probe
  source 1..29: mol_type = other DNA
gggggtatagctcagtggtagagcatttg

SEQ ID NO: 49245 - DNA, 30 bp, synthetic construct; identical to SEQ ID NO: 6598
  misc_feature 1..30: note = Probe
  source 1..30: mol_type = other DNA

SEQ ID NO: 49246 - DNA, 31 bp, synthetic construct; identical to SEQ ID NO: 6599
  misc_feature 1..31: note = Probe
  source 1..31: mol_type = other DNA

SEQ ID NO: 49247 - DNA, 32 bp, synthetic construct; identical to SEQ ID NO: 6600
  misc_feature 1..32: note = Probe
  source 1..32: mol_type = other DNA

SEQ ID NO: 49248 - DNA, 33 bp, synthetic construct; identical to SEQ ID NO: 6601
  misc_feature 1..33: note = Probe
  source 1..33: mol_type = other DNA

SEQ ID NO: 49249 - DNA, 34 bp, synthetic construct; identical to SEQ ID NO: 6602
  misc_feature 1..34: note = Probe
  source 1..34: mol_type = other DNA

SEQ ID NO: 49250 - DNA, 35 bp, synthetic construct; identical to SEQ ID NO: 6603
  misc_feature 1..35: note = Probe
  source 1..35: mol_type = other DNA

SEQ ID NO: 49251 - DNA, 31 bp, synthetic construct
  misc_feature 1..31: note = Probe
  source 1..31: mol_type = other DNA
gggggtatagctcagtggtagagcgcgtgct

SEQ ID NO: 49252 - DNA, 32 bp, synthetic construct
  misc_feature 1..32: note = Probe
  source 1..32: mol_type = other DNA
gggggtatagcttaggggtagagcatttgact

SEQ ID NO: 49253 - DNA, 32 bp, synthetic construct; identical to SEQ ID NO: 6607
  misc_feature 1..32: note = Probe
  source 1..32: mol_type = other DNA

SEQ ID NO: 49254 - DNA, 17 bp, synthetic construct
  misc_feature 1..17: note = Probe
  source 1..17: mol_type = other DNA
gggggtgtagctcagtg

SEQ ID NO: 49255 - DNA, 18 bp, synthetic construct
  misc_feature 1..18: note = Probe
  source 1..18: mol_type = other DNA
gggggtgtagctcagtgg

SEQ ID NO: 49256 - DNA, 20 bp, synthetic construct
  misc_feature 1..20: note = Probe
  source 1..20: mol_type = other DNA
gggggtgtagctcagtggta

SEQ ID NO: 49257 - DNA, 22 bp, synthetic construct
  misc_feature 1..22: note = Probe
  source 1..22: mol_type = other DNA
gggggtgtagctcagtggtaga

SEQ ID NO: 49258 - DNA, 30 bp, synthetic construct; identical to SEQ ID NO: 21919
  misc_feature 1..30: note = Probe
  source 1..30: mol_type = other DNA

SEQ ID NO: 49259 - DNA, 31 bp, synthetic construct; identical to SEQ ID NO: 6611
  misc_feature 1..31: note = Probe
  source 1..31: mol_type = other DNA

SEQ ID NO: 49260 - DNA, 32 bp, synthetic construct; identical to SEQ ID NO: 6612
  misc_feature 1..32: note = Probe
  source 1..32: mol_type = other DNA

SEQ ID NO: 49261 - DNA, 33 bp, synthetic construct; identical to SEQ ID NO: 21922
  misc_feature 1..33: note = Probe
  source 1..33: mol_type = other DNA

SEQ ID NO: 49262 - DNA, 35 bp, synthetic construct
  misc_feature 1..35: note = Probe
  source 1..35: mol_type = other DNA
gggggtgtagctcagtggtagagcatttgactgca

SEQ ID NO: 49263 - DNA, 30 bp, synthetic construct; identical to SEQ ID NO: 40932
  misc_feature 1..30: note = Probe
  source 1..30: mol_type = other DNA

SEQ ID NO: 49264 - DNA, 31 bp, synthetic construct; identical to SEQ ID NO: 6615
  misc_feature 1..31: note = Probe
  source 1..31: mol_type = other DNA

SEQ ID NO: 49265 - DNA, 32 bp, synthetic construct
  misc_feature 1..32: note = Probe
  source 1..32: mol_type = other DNA
gggggtgtagctcagtggtagagcgcatgctt

SEQ ID NO: 49266 - DNA, 33 bp, synthetic construct
  misc_feature 1..33: note = Probe
  source 1..33: mol_type = other DNA
gggggtgtagctcagtggtagagcgcatgcttt

SEQ ID NO: 49267 - DNA, 27 bp, synthetic construct
  misc_feature 1..27: note = Probe
  source 1..27: mol_type = other DNA
gggggtgtagctcagtggtagagcgcg

SEQ ID NO: 49268 - DNA, 33 bp, synthetic construct; identical to SEQ ID NO: 6616
  misc_feature 1..33: note = Probe
  source 1..33: mol_type = other DNA

SEQ ID NO: 49269 - DNA, 33 bp, synthetic construct; identical to SEQ ID NO: 6617
  misc_feature 1..33: note = Probe
  source 1..33: mol_type = other DNA

SEQ ID NO: 49270 - DNA, 35 bp, synthetic construct
  misc_feature 1..35: note = Probe
  source 1..35: mol_type = other DNA
gggggtgtagctcagtggtagagcgcgtgcttcgc

SEQ ID NO: 49271 - DNA, 26 bp, synthetic construct
  misc_feature 1..26: note = Probe
  source 1..26: mol_type = other DNA
gggggttcgattccttccttttttgt

SEQ ID NO: 49272 - DNA, 27 bp, synthetic construct
  misc_feature 1..27: note = Probe
  source 1..27: mol_type = other DNA
gggggttcgattccttccttttttgtc

SEQ ID NO: 49273 - DNA, 31 bp, synthetic construct; identical to SEQ ID NO: 6619
  misc_feature 1..31: note = Probe
  source 1..31: mol_type = other DNA

SEQ ID NO: 49274 - DNA, 32 bp, synthetic construct; identical to SEQ ID NO: 6620
  misc_feature 1..32: note = Probe
  source 1..32: mol_type = other DNA

SEQ ID NO: 49275 - DNA, 33 bp, synthetic construct; identical to SEQ ID NO: 6621
  misc_feature 1..33: note = Probe
  source 1..33: mol_type = other DNA

SEQ ID NO: 49276 - DNA, 16 bp, synthetic construct
  misc_feature 1..16: note = Probe
  source 1..16: mol_type = other DNA
ggggtatgattctcgc

SEQ ID NO: 49277 - DNA, 17 bp, synthetic construct
  misc_feature 1..17: note = Probe
  source 1..17: mol_type = other DNA
ggggtatgattctcgct

SEQ ID NO: 49278 - DNA, 29 bp, synthetic construct
  misc_feature 1..29: note = Probe
  source 1..29: mol_type = other DNA
ggggtgtagctcagtggtagagcgcgtgc

SEQ ID NO: 49279 - DNA, 23 bp, synthetic construct
  misc_feature 1..23: note = Probe
  source 1..23: mol_type = other DNA
ggggtgtgataggtggcacggag

SEQ ID NO: 49280 - DNA, 24 bp, synthetic construct
  misc_feature 1..24: note = Probe
  source 1..24: mol_type = other DNA
ggggtgtgataggtggcacggaga

SEQ ID NO: 49281 - DNA, 21 bp, synthetic construct
  misc_feature 1..21: note = Probe
  source 1..21: mol_type = other DNA
ggggttaggcctctttttacc

SEQ ID NO: 49282 - DNA, 24 bp, synthetic construct
  misc_feature 1..24: note = Probe
  source 1..24: mol_type = other DNA
ggggttaggcctctttttaccagc

SEQ ID NO: 49283 - DNA, 25 bp, synthetic construct
  misc_feature 1..25: note = Probe
  source 1..25: mol_type = other DNA
ggggttaggcctctttttaccagct

SEQ ID NO: 49284 - DNA, 26 bp, synthetic construct
  misc_feature 1..26: note = Probe
  source 1..26: mol_type = other DNA
ggggttcgattccccgacggggagac

SEQ ID NO: 49285 - DNA, 26 bp, synthetic construct
  misc_feature 1..26: note = Probe
  source 1..26: mol_type = other DNA
ggggttcgattccccgacggggaggc

SEQ ID NO: 49286 - DNA, 27 bp, synthetic construct
  misc_feature 1..27: note = Probe
  source 1..27: mol_type = other DNA
ggggttcgattccccgacggggaggca

SEQ ID NO: 49287 - DNA, 20 bp, synthetic construct
  misc_feature 1..20: note = Probe
  source 1..20: mol_type = other DNA
ggggttttgcagtccttagc

SEQ ID NO: 49288 - DNA, 21 bp, synthetic construct
  misc_feature 1..21: note = Probe
  source 1..21: mol_type = other DNA
ggggttttgcagtccttagct

SEQ ID NO: 49289 - DNA, 31 bp, synthetic construct; identical to SEQ ID NO: 6644
  misc_feature 1..31: note = Probe
  source 1..31: mol_type = other DNA

SEQ ID NO: 49290 - DNA, 32 bp, synthetic construct; identical to SEQ ID NO: 6645
  misc_feature 1..32: note = Probe
  source 1..32: mol_type = other DNA

SEQ ID NO: 49291 - DNA, 33 bp, synthetic construct; identical to SEQ ID NO: 6646
  misc_feature 1..33: note = Probe
  source 1..33: mol_type = other DNA

SEQ ID NO: 49292 - DNA, 16 bp, synthetic construct
  misc_feature 1..16: note = Probe
  source 1..16: mol_type = other DNA
gggtatgattctcgct

SEQ ID NO: 49293 - DNA, 28 bp, synthetic construct
  misc_feature 1..28: note = Probe
  source 1..28: mol_type = other DNA
gggtccagggttcaagtccctgttcggg

SEQ ID NO: 49294 - DNA, 33 bp, synthetic construct; identical to SEQ ID NO: 21973
  misc_feature 1..33: note = Probe
  source 1..33: mol_type = other DNA

SEQ ID NO: 49295 - DNA, 16 bp, synthetic construct
  misc_feature 1..16: note = Probe
  source 1..16: mol_type = other DNA
gggtccccggtagctc

SEQ ID NO: 49296 - DNA, 17 bp, synthetic construct
  misc_feature 1..17: note = Probe
  source 1..17: mol_type = other DNA
gggtccccggtagctcg

SEQ ID NO: 49297 - DNA, 31 bp, synthetic construct
  misc_feature 1..31: note = Probe
  source 1..31: mol_type = other DNA
gggtcgcgagttcaaatctcgctggggcctc

SEQ ID NO: 49298 - DNA, 33 bp, synthetic construct
  misc_feature 1..33: note = Probe
  source 1..33: mol_type = other DNA
gggtcgcgagttcaattctcgctggggcctgtg

SEQ ID NO: 49299 - DNA, 28 bp, synthetic construct
  misc_feature 1..28: note = Probe
  source 1..28: mol_type = other DNA
gggtcgtgggttcgagccccacgttggg

SEQ ID NO: 49300 - DNA, 30 bp, synthetic construct; identical to SEQ ID NO: 10861
  misc_feature 1..30: note = Probe
  source 1..30: mol_type = other DNA

SEQ ID NO: 49301 - DNA, 35 bp, synthetic construct
  misc_feature 1..35: note = Probe
  source 1..35: mol_type = other DNA
gggtgcttagctgttaactaagtgtttgtgggttt

SEQ ID NO: 49302 - DNA, 22 bp, synthetic construct
  misc_feature 1..22: note = Probe
  source 1..22: mol_type = other DNA
gggtgtgataggtggcacggag

SEQ ID NO: 49303 - DNA, 20 bp, synthetic construct
  misc_feature 1..20: note = Probe
  source 1..20: mol_type = other DNA
gggttaggcctctttttacc

SEQ ID NO: 49304 - DNA, 23 bp, synthetic construct
  misc_feature 1..23: note = Probe
  source 1..23: mol_type = other DNA
gggttaggcctctttttaccagc

SEQ ID NO: 49305 - DNA, 24 bp, synthetic construct
  misc_feature 1..24: note = Probe
  source 1..24: mol_type = other DNA
gggttaggcctctttttaccagct

SEQ ID NO: 49306 - DNA, 25 bp, synthetic construct
  misc_feature 1..25: note = Probe
  source 1..25: mol_type = other DNA
gggttcaatccccggcacctccacc

SEQ ID NO: 49307 - DNA, 26 bp, synthetic construct
  misc_feature 1..26: note = Probe
  source 1..26: mol_type = other DNA
gggttcaattccccgacggggaggtg

SEQ ID NO: 49308 - DNA, 26 bp, synthetic construct
  misc_feature 1..26: note = Probe
  source 1..26: mol_type = other DNA
gggttcaattcccggtcagggaacca

SEQ ID NO: 49309 - DNA, 25 bp, synthetic construct
  misc_feature 1..25: note = Probe
  source 1..25: mol_type = other DNA
gggttcgaatcccaccgctgccagg

SEQ ID NO: 49310 - DNA, 26 bp, synthetic construct
  misc_feature 1..26: note = Probe
  source 1..26: mol_type = other DNA
gggttcgaatcccaccgctgccaggt

SEQ ID NO: 49311 - DNA, 26 bp, synthetic construct
  misc_feature 1..26: note = Probe
  source 1..26: mol_type = other DNA
gggttcgaatcccacttctgacacaa

SEQ ID NO: 49312 - DNA, 26 bp, synthetic construct
  misc_feature 1..26: note = Probe
  source 1..26: mol_type = other DNA
gggttcgaatcccagcggggccttac

SEQ ID NO: 49313 - DNA, 26 bp, synthetic construct
  misc_feature 1..26: note = Probe
  source 1..26: mol_type = other DNA
gggttcgaatcccagcggggccttag

SEQ ID NO: 49314 - DNA, 26 bp, synthetic construct
  misc_feature 1..26: note = Probe
  source 1..26: mol_type = other DNA
gggttcgaatcccagcggtgcctccg

SEQ ID NO: 49315 - DNA, 26 bp, synthetic construct
  misc_feature 1..26: note = Probe
  source 1..26: mol_type = other DNA
gggttcgaatcccagcggtgccttta

SEQ ID NO: 49316 - DNA, 26 bp, synthetic construct
  misc_feature 1..26: note = Probe
  source 1..26: mol_type = other DNA
gggttcgactcccggtatgggaacaa

SEQ ID NO: 49317 - DNA, 26 bp, synthetic construct
  misc_feature 1..26: note = Probe
  source 1..26: mol_type = other DNA
gggttcgactcccggtgtgggaacgc

SEQ ID NO: 49318 - DNA, 26 bp, synthetic construct
  misc_feature 1..26: note = Probe
  source 1..26: mol_type = other DNA
gggttcgagccccacgttgggcggca

SEQ ID NO: 49319 - DNA, 26 bp, synthetic construct
  misc_feature 1..26: note = Probe
  source 1..26: mol_type = other DNA
gggttcgagtcccacccggggtaaag

SEQ ID NO: 49320 - DNA, 26 bp, synthetic construct
  misc_feature 1..26: note = Probe
  source 1..26: mol_type = other DNA
gggttcgagtcccatctgggtcgcgt

SEQ ID NO: 49321 - DNA, 21 bp, synthetic construct
  misc_feature 1..21: note = Probe
  source 1..21: mol_type = other DNA
gggttcgagtcccttcgtggt

SEQ ID NO: 49322 - DNA, 26 bp, synthetic construct
  misc_feature 1..26: note = Probe
  source 1..26: mol_type = other DNA
gggttcgagtcccttcgtggtcgttg

SEQ ID NO: 49323 - DNA, 26 bp, synthetic construct
  misc_feature 1..26: note = Probe
  source 1..26: mol_type = other DNA
gggttcgatccccagcatctccagtg

SEQ ID NO: 49324 - DNA, 26 bp, synthetic construct
  misc_feature 1..26: note = Probe
  source 1..26: mol_type = other DNA
gggttcgatccccggcatctccattg

SEQ ID NO: 49325 - DNA, 26 bp, synthetic construct
  misc_feature 1..26: note = Probe
  source 1..26: mol_type = other DNA
gggttcgatccccgtacgggccactg

SEQ ID NO: 49326 - DNA, 26 bp, synthetic construct
  misc_feature 1..26: note = Probe
  source 1..26: mol_type = other DNA
gggttcgatccccgtactggccacgt

SEQ ID NO: 49327 - DNA, 22 bp, synthetic construct
  misc_feature 1..22: note = Probe
  source 1..22: mol_type = other DNA
gggttcgattccccgacgggga

SEQ ID NO: 49328 - DNA, 23 bp, synthetic construct
  misc_feature 1..23: note = Probe
  source 1..23: mol_type = other DNA
gggttcgattccccgacggggag

SEQ ID NO: 49329 - DNA, 24 bp, synthetic construct
  misc_feature 1..24: note = Probe
  source 1..24: mol_type = other DNA
gggttcgattccccgacggggaga

SEQ ID NO: 49330 - DNA, 25 bp, synthetic construct
  misc_feature 1..25: note = Probe
  source 1..25: mol_type = other DNA
gggttcgattccccgacggggagac

SEQ ID NO: 49331 - DNA, 24 bp, synthetic construct
  misc_feature 1..24: note = Probe
  source 1..24: mol_type = other DNA
gggttcgattccccgacggggagg

SEQ ID NO: 49332 - DNA, 25 bp, synthetic construct
  misc_feature 1..25: note = Probe
  source 1..25: mol_type = other DNA
gggttcgattccccgacggggaggc

SEQ ID NO: 49333 - DNA, 26 bp, synthetic construct
  misc_feature 1..26: note = Probe
  source 1..26: mol_type = other DNA
gggttcgattccccgacggggaggca

SEQ ID NO: 49334 - DNA, 26 bp, synthetic construct
  misc_feature 1..26: note = Probe
  source 1..26: mol_type = other DNA
gggttcgattcccggccaacgcaagt

SEQ ID NO: 49335 - DNA, 26 bp, synthetic construct
  misc_feature 1..26: note = Probe
  source 1..26: mol_type = other DNA
gggttcgattcccggccaacgcagtg

SEQ ID NO: 49336 - DNA, 23 bp, synthetic construct
  misc_feature 1..23: note = Probe
  source 1..23: mol_type = other DNA
gggttcgattcccggccaatgca

SEQ ID NO: 49337 - DNA, 26 bp, synthetic construct
  misc_feature 1..26: note = Probe
  source 1..26: mol_type = other DNA
gggttcgattcccggccaatgcacga

SEQ ID NO: 49338 - DNA, 26 bp, synthetic construct
  misc_feature 1..26: note = Probe
  source 1..26: mol_type = other DNA
gggttcgattcccggccaatgcagca

SEQ ID NO: 49339 - DNA, 25 bp, synthetic construct
  misc_feature 1..25: note = Probe
  source 1..25: mol_type = other DNA
gggttcgattccttccttttttgtc

SEQ ID NO: 49340 - DNA, 20 bp, synthetic construct
  misc_feature 1..20: note = Probe
  source 1..20: mol_type = other DNA
gggttcgattctcatagtcc

SEQ ID NO: 49341 - DNA, 21 bp, synthetic construct
  misc_feature 1..21: note = Probe
  source 1..21: mol_type = other DNA
gggttcgattctcatagtcct

SEQ ID NO: 49342 - DNA, 25 bp, synthetic construct
  misc_feature 1..25: note = Probe
  source 1..25: mol_type = other DNA
gggttcgattctcatagtcctagaa

SEQ ID NO: 49343 - DNA, 26 bp, synthetic construct
  misc_feature 1..26: note = Probe
  source 1..26: mol_type = other DNA
gggttcgattctcatagtcctagaaa

SEQ ID NO: 49344 - DNA, 24 bp, synthetic construct
  misc_feature 1..24: note = Probe
  source 1..24: mol_type = other DNA
ggtaaaatggctgagtgaagcatt

SEQ ID NO: 49345 - DNA, 25 bp, synthetic construct
  misc_feature 1..25: note = Probe
  source 1..25: mol_type = other DNA
ggtaaaatggctgagtgaagcattg

SEQ ID NO: 49346 - DNA, 28 bp, synthetic construct
  misc_feature 1..28: note = Probe
  source 1..28: mol_type = other DNA
ggtaaaatggctgagtgaagcattggac

SEQ ID NO: 49347 - DNA, 29 bp, synthetic construct
  misc_feature 1..29: note = Probe
  source 1..29: mol_type = other DNA
ggtaaaatggctgagtgaagcattggact

SEQ ID NO: 49348 - DNA, 30 bp, synthetic construct; identical to SEQ ID NO: 6688
  misc_feature 1..30: note = Probe
  source 1..30: mol_type = other DNA

SEQ ID NO: 49349 - DNA, 31 bp, synthetic construct; identical to SEQ ID NO: 6689
  misc_feature 1..31: note = Probe
  source 1..31: mol_type = other DNA

SEQ ID NO: 49350 - DNA, 32 bp, synthetic construct; identical to SEQ ID NO: 6690
  misc_feature 1..32: note = Probe
  source 1..32: mol_type = other DNA

SEQ ID NO: 49351 - DNA, 33 bp, synthetic construct; identical to SEQ ID NO: 6691
  misc_feature 1..33: note = Probe
  source 1..33: mol_type = other DNA

SEQ ID NO: 49352 - DNA, 34 bp, synthetic construct; identical to SEQ ID NO: 6692
  misc_feature 1..34: note = Probe
  source 1..34: mol_type = other DNA

SEQ ID NO: 49353 - DNA, 35 bp, synthetic construct; identical to SEQ ID NO: 6693
  misc_feature 1..35: note = Probe
  source 1..35: mol_type = other DNA

SEQ ID NO: 49354 - DNA, 36 bp, synthetic construct; identical to SEQ ID NO: 6694
  misc_feature 1..36: note = Probe
  source 1..36: mol_type = other DNA

SEQ ID NO: 49355 - DNA, 37 bp, synthetic construct; identical to SEQ ID NO: 6695
  misc_feature 1..37: note = Probe
  source 1..37: mol_type = other DNA

SEQ ID NO: 49356 - DNA, 38 bp, synthetic construct; identical to SEQ ID NO: 6696
  misc_feature 1..38: note = Probe
  source 1..38: mol_type = other DNA

SEQ ID NO: 49357 - DNA, 40 bp, synthetic construct; identical to SEQ ID NO: 22052
  misc_feature 1..40: note = Probe
  source 1..40: mol_type = other DNA

SEQ ID NO: 49358 - DNA, 24 bp, synthetic construct
  misc_feature 1..24: note = Probe
  source 1..24: mol_type = other DNA
ggtaatcgcataaaacttaaaact

SEQ ID NO: 49359 - DNA, 29 bp, synthetic construct
  misc_feature 1..29: note = Probe
  source 1..29: mol_type = other DNA
ggtaatcgcataaaacttaaaactttaca

SEQ ID NO: 49360 - DNA, 32 bp, synthetic construct; identical to SEQ ID NO: 22055
  misc_feature 1..32: note = Probe
  source 1..32: mol_type = other DNA

SEQ ID NO: 49361 - DNA, 35 bp, synthetic construct
  misc_feature 1..35: note = Probe
  source 1..35: mol_type = other DNA
ggtaatcgcataaaacttaaaactttacagtcaga

SEQ ID NO: 49362 - DNA, 36 bp, synthetic construct; identical to SEQ ID NO: 32531
  misc_feature 1..36: note = Probe
  source 1..36: mol_type = other DNA

SEQ ID NO: 49363 - DNA, 41 bp, synthetic construct
  misc_feature 1..41: note = Probe
  source 1..41: mol_type = other DNA
ggtaatcgcataaaacttaaaactttacagtcagaggttca

SEQ ID NO: 49364 - DNA, 32 bp, synthetic construct; identical to SEQ ID NO: 6703
  misc_feature 1..32: note = Probe
  source 1..32: mol_type = other DNA

SEQ ID NO: 49365 - DNA, 37 bp, synthetic construct; identical to SEQ ID NO: 22066
  misc_feature 1..37: note = Probe
  source 1..37: mol_type = other DNA

SEQ ID NO: 49366 - DNA, 50 bp, synthetic construct
  misc_feature 1..50: note = Probe
  source 1..50: mol_type = other DNA
ggtagagcatgagactcttaatctcagggtcgtgggttcgagccccacgt

SEQ ID NO: 49367 - DNA, 50 bp, synthetic construct
  misc_feature 1..50: note = Probe
  source 1..50: mol_type = other DNA
ggtagagcatgggactcttaatcccagggtcgtgggttcgagccccacgt

SEQ ID NO: 49368 - DNA, 50 bp, synthetic construct
  misc_feature 1..50: note = Probe
  source 1..50: mol_type = other DNA
ggtagagcgcatgctttgcacgtatgaggccccgggttcaatccccggca

SEQ ID NO: 49369 - DNA, 24 bp, synthetic construct
  misc_feature 1..24: note = Probe
  source 1..24: mol_type = other DNA
ggtagcgtggccgagcggtctaag

SEQ ID NO: 49370 - DNA, 25 bp, synthetic construct
  misc_feature 1..25: note = Probe
  source 1..25: mol_type = other DNA
ggtagcgtggccgagcggtctaagg

SEQ ID NO: 49371 - DNA, 26 bp, synthetic construct
  misc_feature 1..26: note = Probe
  source 1..26: mol_type = other DNA
ggtagcgtggccgagcggtctaaggc

SEQ ID NO: 49372 - DNA, 32 bp, synthetic construct
  misc_feature 1..32: note = Probe
  source 1..32: mol_type = other DNA
ggtagcgtggccgagcggtctaaggcgctgga

SEQ ID NO: 49373 - DNA, 35 bp, synthetic construct; identical to SEQ ID NO: 22078
  misc_feature 1..35: note = Probe
  source 1..35: mol_type = other DNA

SEQ ID NO: 49374 - DNA, 50 bp, synthetic construct
  misc_feature 1..50: note = Probe
  source 1..50: mol_type = other DNA
ggtagcgtggccgagcggtctaaggcgctggattaaggctccagtctctt

SEQ ID NO: 49375 - DNA, 50 bp, synthetic construct
  misc_feature 1..50: note = Probe
  source 1..50: mol_type = other DNA
ggtagcgtggccgagcggtctaaggcgctggatttaggctccagtctctt

SEQ ID NO: 49376 - DNA, 18 bp, synthetic construct
  misc_feature 1..18: note = Probe
  source 1..18: mol_type = other DNA
ggtagcgtggccgagtgg

SEQ ID NO: 49377 - DNA, 21 bp, synthetic construct
  misc_feature 1..21: note = Probe
  source 1..21: mol_type = other DNA
ggtagcgtggccgagtggtct

SEQ ID NO: 49378 - DNA, 22 bp, synthetic construct
  misc_feature 1..22: note = Probe
  source 1..22: mol_type = other DNA
ggtagcgtggccgagtggtcta

SEQ ID NO: 49379 - DNA, 24 bp, synthetic construct
  misc_feature 1..24: note = Probe
  source 1..24: mol_type = other DNA
ggtagcgtggccgagtggtctaag

SEQ ID NO: 49380 - DNA, 34 bp, synthetic construct; identical to SEQ ID NO: 6712
  misc_feature 1..34: note = Probe
  source 1..34: mol_type = other DNA

SEQ ID NO: 49381 - DNA, 26 bp, synthetic construct
  misc_feature 1..26: note = Probe
  source 1..26: mol_type = other DNA
ggtagcgtggccgagtggtctaaggc

SEQ ID NO: 49382 - DNA, 33 bp, synthetic construct
  misc_feature 1..33: note = Probe
  source 1..33: mol_type = other DNA
ggtagcgtggccgagtggtctaaggcgctggat

SEQ ID NO: 49383 - DNA, 16 bp, synthetic construct
  misc_feature 1..16: note = Probe
  source 1..16: mol_type = other DNA
ggtagtgtggccgagc

SEQ ID NO: 49384 - DNA, 25 bp, synthetic construct
  misc_feature 1..25: note = Probe
  source 1..25: mol_type = other DNA
ggtagtgtggccgagcggtctaagg

SEQ ID NO: 49385 - DNA, 35 bp, synthetic construct
  misc_feature 1..35: note = Probe
  source 1..35: mol_type = other DNA
ggtagtgtggccgagcggtctaaggcgctggattt

SEQ ID NO: 49386 - DNA, 41 bp, synthetic construct; identical to SEQ ID NO: 22102
  misc_feature 1..41: note = Probe
  source 1..41: mol_type = other DNA

SEQ ID NO: 49387 - DNA, 32 bp, synthetic construct; identical to SEQ ID NO: 13915
  misc_feature 1..32: note = Probe
  source 1..32: mol_type = other DNA

SEQ ID NO: 49388 - DNA, 33 bp, synthetic construct; identical to SEQ ID NO: 6726
  misc_feature 1..33: note = Probe
  source 1..33: mol_type = other DNA

SEQ ID NO: 49389 - DNA, 33 bp, synthetic construct; identical to SEQ ID NO: 6728
  misc_feature 1..33: note = Probe
  source 1..33: mol_type = other DNA

SEQ ID NO: 49390 - DNA, 33 bp, synthetic construct; identical to SEQ ID NO: 1407
  misc_feature 1..33: note = Probe
  source 1..33: mol_type = other DNA

SEQ ID NO: 49391 - DNA, 33 bp, synthetic construct; identical to SEQ ID NO: 1408
  misc_feature 1..33: note = Probe
  source 1..33: mol_type = other DNA

SEQ ID NO: 49392 - DNA, 27 bp, synthetic construct
  misc_feature 1..27: note = Probe
  source 1..27: mol_type = other DNA
ggtcagctaaataagctatcgggccca

SEQ ID NO: 49393 - DNA, 29 bp, synthetic construct
  misc_feature 1..29: note = Probe
  source 1..29: mol_type = other DNA
ggtcagctaaataagctatcgggcccata

SEQ ID NO: 49394 - DNA, 30 bp, synthetic construct; identical to SEQ ID NO: 6735
  misc_feature 1..30: note = Probe
  source 1..30: mol_type = other DNA

SEQ ID NO: 49395 - DNA, 40 bp, synthetic construct; identical to SEQ ID NO: 6741
  misc_feature 1..40: note = Probe
  source 1..40: mol_type = other DNA

SEQ ID NO: 49396 - DNA, 41 bp, synthetic construct; identical to SEQ ID NO: 6742
  misc_feature 1..41: note = Probe
  source 1..41: mol_type = other DNA

SEQ ID NO: 49397 - DNA, 42 bp, synthetic construct; identical to SEQ ID NO: 6743
  misc_feature 1..42: note = Probe
  source 1..42: mol_type = other DNA

SEQ ID NO: 49398 - DNA, 43 bp, synthetic construct; identical to SEQ ID NO: 6744
  misc_feature 1..43: note = Probe
  source 1..43: mol_type = other DNA

SEQ ID NO: 49399 - DNA, 44 bp, synthetic construct; identical to SEQ ID NO: 6745
  misc_feature 1..44: note = Probe
  source 1..44: mol_type = other DNA

SEQ ID NO: 49400 - DNA, 45 bp, synthetic construct; identical to SEQ ID NO: 6746
  misc_feature 1..45: note = Probe
  source 1..45: mol_type = other DNA

SEQ ID NO: 49401 - DNA, 46 bp, synthetic construct; identical to SEQ ID NO: 6747
  misc_feature 1..46: note = Probe
  source 1..46: mol_type = other DNA

SEQ ID NO: 49402 - DNA, 50 bp, synthetic construct; identical to SEQ ID NO: 1410
  misc_feature 1..50: note = Probe
  source 1..50: mol_type = other DNA

SEQ ID NO: 49403 - DNA, 29 bp, synthetic construct
  misc_feature 1..29: note = Probe
  source 1..29: mol_type = other DNA
ggtccagggttcaagtccctgttcgggcg

SEQ ID NO: 49404 - DNA, 31 bp, synthetic construct; identical to SEQ ID NO: 22145
  misc_feature 1..31: note = Probe
  source 1..31: mol_type = other DNA

SEQ ID NO: 49405 - DNA, 32 bp, synthetic construct; identical to SEQ ID NO: 1414
  misc_feature 1..32: note = Probe
  source 1..32: mol_type = other DNA

SEQ ID NO: 49406 - DNA, 33 bp, synthetic construct; identical to SEQ ID NO: 1415
  misc_feature 1..33: note = Probe
  source 1..33: mol_type = other DNA

SEQ ID NO: 49407 - DNA, 50 bp, synthetic construct; identical to SEQ ID NO: 32589
  misc_feature 1..50: note = Probe
  source 1..50: mol_type = other DNA

SEQ ID NO: 49408 - DNA, 50 bp, synthetic construct; identical to SEQ ID NO: 1417
  misc_feature 1..50: note = Probe
  source 1..50: mol_type = other DNA

SEQ ID NO: 49409 - DNA, 26 bp, synthetic construct
  misc_feature 1..26: note = Probe
  source 1..26: mol_type = other DNA
ggtcccgggttcaaatcccggacgag

SEQ ID NO: 49410 - DNA, 32 bp, synthetic construct; identical to SEQ ID NO: 22148
  misc_feature 1..32: note = Probe
  source 1..32: mol_type = other DNA

SEQ ID NO: 49411 - DNA, 32 bp, synthetic construct; identical to SEQ ID NO: 6752
  misc_feature 1..32: note = Probe
  source 1..32: mol_type = other DNA

SEQ ID NO: 49412 - DNA, 29 bp, synthetic construct
  misc_feature 1..29: note = Probe
  source 1..29: mol_type = other DNA
ggtcccgggttcgatccccagcatctcca

SEQ ID NO: 49413 - DNA, 32 bp, synthetic construct; identical to SEQ ID NO: 22153
  misc_feature 1..32: note = Probe
  source 1..32: mol_type = other DNA

SEQ ID NO: 49414 - DNA, 36 bp, synthetic construct; identical to SEQ ID NO: 22154
  misc_feature 1..36: note = Probe
  source 1..36: mol_type = other DNA

SEQ ID NO: 49415 - DNA, 21 bp, synthetic construct
  misc_feature 1..21: note = Probe
  source 1..21: mol_type = other DNA
ggtcctagcctttctattagc

SEQ ID NO: 49416 - DNA, 27 bp, synthetic construct
  misc_feature 1..27: note = Probe
  source 1..27: mol_type = other DNA
ggtcctgagttcgaacctcagaggggg

SEQ ID NO: 49417 - DNA, 32 bp, synthetic construct
  misc_feature 1..32: note = Probe
  source 1..32: mol_type = other DNA
ggtcctgagttcgaacctcagagggggcagct

SEQ ID NO: 49418 - DNA, 26 bp, synthetic construct
  misc_feature 1..26: note = Probe
  source 1..26: mol_type = other DNA
ggtcctgggttcgagccccagtggaa

SEQ ID NO: 49419 - DNA, 29 bp, synthetic construct
  misc_feature 1..29: note = Probe
  source 1..29: mol_type = other DNA
ggtcctgggttcgagccccagtggaacca

SEQ ID NO: 49420 - DNA, 32 bp, synthetic construct; identical to SEQ ID NO: 6754
  misc_feature 1..32: note = Probe
  source 1..32: mol_type = other DNA

SEQ ID NO: 49421 - DNA, 28 bp, synthetic construct
  misc_feature 1..28: note = Probe
  source 1..28: mol_type = other DNA
ggtcgcgagttcaaatctcgctggggcc

SEQ ID NO: 49422 - DNA, 29 bp, synthetic construct
  misc_feature 1..29: note = Probe
  source 1..29: mol_type = other DNA
ggtcgcgagttcaaatctcgctggggcct

SEQ ID NO: 49423 - DNA, 30 bp, synthetic construct
  misc_feature 1..30: note = Probe
  source 1..30: mol_type = other DNA
ggtcgcgagttcaaatctcgctggggcctc

SEQ ID NO: 49424 - DNA, 32 bp, synthetic construct
  misc_feature 1..32: note = Probe
  source 1..32: mol_type = other DNA
ggtcgcgagttcaattctcgctggggcctgtg

SEQ ID NO: 49425 - DNA, 32 bp, synthetic construct; identical to SEQ ID NO: 6757
  misc_feature 1..32: note = Probe
  source 1..32: mol_type = other DNA

SEQ ID NO: 49426 - DNA, 32 bp, synthetic construct; identical to SEQ ID NO: 6758
  misc_feature 1..32: note = Probe
  source 1..32: mol_type = other DNA

SEQ ID NO: 49427 - DNA, 29 bp, synthetic construct
  misc_feature 1..29: note = Probe
  source 1..29: mol_type = other DNA
ggtcgctggttcgattccggctcgaagga

SEQ ID NO: 49428 - DNA, 31 bp, synthetic construct; identical to SEQ ID NO: 22170
  misc_feature 1..31: note = Probe
  source 1..31: mol_type = other DNA

SEQ ID NO: 49429 - DNA, 32 bp, synthetic construct; identical to SEQ ID NO: 22171
  misc_feature 1..32: note = Probe
  source 1..32: mol_type = other DNA

SEQ ID NO: 49430 - DNA, 29 bp, synthetic construct
  misc_feature 1..29: note = Probe
  source 1..29: mol_type = other DNA
ggtcgtgggttcgagccccacgttgggcg

SEQ ID NO: 49431 - DNA, 16 bp, synthetic construct
  misc_feature 1..16: note = Probe
  source 1..16: mol_type = other DNA
ggtcgtggttgtagtc

SEQ ID NO: 49432 - DNA, 17 bp, synthetic construct
  misc_feature 1..17: note = Probe
  source 1..17: mol_type = other DNA
ggtcgtggttgtagtcc

SEQ ID NO: 49433 - DNA, 19 bp, synthetic construct
  misc_feature 1..19: note = Probe
  source 1..19: mol_type = other DNA
ggtcgtggttgtagtccgt

SEQ ID NO: 49434 - DNA, 27 bp, synthetic construct
  misc_feature 1..27: note = Probe
  source 1..27: mol_type = other DNA
ggtcgtggttgtagtccgtgcgagaat

SEQ ID NO: 49435 - DNA, 29 bp, synthetic construct
  misc_feature 1..29: note = Probe
  source 1..29: mol_type = other DNA
ggtcgtggttgtagtccgtgcgagaataa

SEQ ID NO: 49436 - DNA, 31 bp, synthetic construct; identical to SEQ ID NO: 6765
  misc_feature 1..31: note = Probe
  source 1..31: mol_type = other DNA

SEQ ID NO: 49437 - DNA, 29 bp, synthetic construct
  misc_feature 1..29: note = Probe
  source 1..29: mol_type = other DNA
ggtctagtggttaggattcggcgctctca

SEQ ID NO: 49438 - DNA, 33 bp, synthetic construct; identical to SEQ ID NO: 13931
  misc_feature 1..33: note = Probe
  source 1..33: mol_type = other DNA

SEQ ID NO: 49439 - DNA, 35 bp, synthetic construct; identical to SEQ ID NO: 22191
  misc_feature 1..35: note = Probe
  source 1..35: mol_type = other DNA

SEQ ID NO: 49440 - DNA, 33 bp, synthetic construct; identical to SEQ ID NO: 22199
  misc_feature 1..33: note = Probe
  source 1..33: mol_type = other DNA

SEQ ID NO: 49441 - DNA, 50 bp, synthetic construct; identical to SEQ ID NO: 40995
  misc_feature 1..50: note = Probe
  source 1..50: mol_type = other DNA

SEQ ID NO: 49442 - DNA, 27 bp, synthetic construct
  misc_feature 1..27: note = Probe
  source 1..27: mol_type = other DNA
ggtgctaataacgccaaggtcgcgggt

SEQ ID NO: 49443 - DNA, 46 bp, synthetic construct
  misc_feature 1..46: note = Probe
  source 1..46: mol_type = other DNA
ggtgcttagctgttaactaagtgtttgtgggtttaagtcccattgg

SEQ ID NO: 49444 - DNA, 50 bp, synthetic construct; identical to SEQ ID NO: 6773
  misc_feature 1..50: note = Probe
  source 1..50: mol_type = other DNA

SEQ ID NO: 49445 - DNA, 26 bp, synthetic construct
  misc_feature 1..26: note = Probe
  source 1..26: mol_type = other DNA
ggtggagttaaagactttttctctga

SEQ ID NO: 49446 - DNA, 28 bp, synthetic construct
  misc_feature 1..28: note = Probe
  source 1..28: mol_type = other DNA
ggtggagttaaagactttttctctgatt

SEQ ID NO: 49447 - DNA, 29 bp, synthetic construct
  misc_feature 1..29: note = Probe
  source 1..29: mol_type = other DNA
ggtggagttaaagactttttctctgattt

SEQ ID NO: 49448 - DNA, 31 bp, synthetic construct; identical to SEQ ID NO: 13938
  misc_feature 1..31: note = Probe
  source 1..31: mol_type = other DNA

SEQ ID NO: 49449 - DNA, 34 bp, synthetic construct; identical to SEQ ID NO: 22217
  misc_feature 1..34: note = Probe
  source 1..34: mol_type = other DNA

SEQ ID NO: 49450 - DNA, 26 bp, synthetic construct
  misc_feature 1..26: note = Probe
  source 1..26: mol_type = other DNA
ggtggttcagtggtagaattctcgcc

SEQ ID NO: 49451 - DNA, 27 bp, synthetic construct
  misc_feature 1..27: note = Probe
  source 1..27: mol_type = other DNA
ggtgtagctcagtggtagagcgcgtgc

SEQ ID NO: 49452 - DNA, 22 bp, synthetic construct
  misc_feature 1..22: note = Probe
  source 1..22: mol_type = other DNA
ggtgtagtggtatcatgcaaga

SEQ ID NO: 49453 - DNA, 33 bp, synthetic construct; identical to SEQ ID NO: 22249
  misc_feature 1..33: note = Probe
  source 1..33: mol_type = other DNA

SEQ ID NO: 49454 - DNA, 35 bp, synthetic construct; identical to SEQ ID NO: 13946
  misc_feature 1..35: note = Probe
  source 1..35: mol_type = other DNA

SEQ ID NO: 49455 - DNA, 36 bp, synthetic construct; identical to SEQ ID NO: 13947
  misc_feature 1..36: note = Probe
  source 1..36: mol_type = other DNA

SEQ ID NO: 49456 - DNA, 35 bp, synthetic construct; identical to SEQ ID NO: 13948
  misc_feature 1..35: note = Probe
  source 1..35: mol_type = other DNA

SEQ ID NO: 49457 - DNA, 17 bp, synthetic construct
  misc_feature 1..17: note = Probe
  source 1..17: mol_type = other DNA
ggttaggattcggcgct

SEQ ID NO: 49458 - DNA, 22 bp, synthetic construct
  misc_feature 1..22: note = Probe
  source 1..22: mol_type = other DNA
ggttaggcctctttttaccagc

SEQ ID NO: 49459 - DNA, 23 bp, synthetic construct
  misc_feature 1..23: note = Probe
  source 1..23: mol_type = other DNA
ggttaggcctctttttaccagct

SEQ ID NO: 49460 - DNA, 18 bp, synthetic construct
  misc_feature 1..18: note = Probe
  source 1..18: mol_type = other DNA
ggttatacccttcccgta

SEQ ID NO: 49461 - DNA, 20 bp, synthetic construct
  misc_feature 1..20: note = Probe
  source 1..20: mol_type = other DNA
ggttatacccttcccgtact

SEQ ID NO: 49462 - DNA, 21 bp, synthetic construct
  misc_feature 1..21: note = Probe
  source 1..21: mol_type = other DNA
ggttatacccttcccgtacta

SEQ ID NO: 49463 - DNA, 22 bp, synthetic construct
  misc_feature 1..22: note = Probe
  source 1..22: mol_type = other DNA
ggttatacccttcccgtactaa

SEQ ID NO: 49464 - DNA, 23 bp, synthetic construct
  misc_feature 1..23: note = Probe
  source 1..23: mol_type = other DNA
ggttcaaatcccggacgagcccc

SEQ ID NO: 49465 - DNA, 25 bp, synthetic construct
  misc_feature 1..25: note = Probe
  source 1..25: mol_type = other DNA
ggttcaaatcccggacgagccccct

SEQ ID NO: 49466 - DNA, 22 bp, synthetic construct
  misc_feature 1..22: note = Probe
  source 1..22: mol_type = other DNA
ggttcaaatccgggtgccccct

SEQ ID NO: 49467 - DNA, 23 bp, synthetic construct
  misc_feature 1..23: note = Probe
  source 1..23: mol_type = other DNA
ggttcaaatccgggtgccccctc

SEQ ID NO: 49468 - DNA, 25 bp, synthetic construct
  misc_feature 1..25: note = Probe
  source 1..25: mol_type = other DNA
ggttcaaatccgggtgccccctcaa

SEQ ID NO: 49469 - DNA, 25 bp, synthetic construct
  misc_feature 1..25: note = Probe
  source 1..25: mol_type = other DNA
ggttcaagtccctgttcgggcggca

SEQ ID NO: 49470 - DNA, 25 bp, synthetic construct
  misc_feature 1..25: note = Probe
  source 1..25: mol_type = other DNA
ggttcaattccccgacggggaggtg

SEQ ID NO: 49471 - DNA, 25 bp, synthetic construct
  misc_feature 1..25: note = Probe
  source 1..25: mol_type = other DNA
ggttcaattcccggtcagggaacca

SEQ ID NO: 49472 - DNA, 25 bp, synthetic construct
  misc_feature 1..25: note = Probe
  source 1..25: mol_type = other DNA
ggttcaattcctcttcttaacaaca

SEQ ID NO: 49473 - DNA, 24 bp, synthetic construct
  misc_feature 1..24: note = Probe
  source 1..24: mol_type = other DNA
ggttcagtggtagaattctcgcct

SEQ ID NO: 49474 - DNA, 25 bp, synthetic construct
  misc_feature 1..25: note = Probe
  source 1..25: mol_type = other DNA
ggttcagtggtagaattctcgcctg

SEQ ID NO: 49475 - DNA, 27 bp, synthetic construct
  misc_feature 1..27: note = Probe
  source 1..27: mol_type = other DNA
ggttcagtggtagaattctcgcctgcc

SEQ ID NO: 49476 - DNA, 20 bp, synthetic construct
  misc_feature 1..20: note = Probe
  source 1..20: mol_type = other DNA
ggttccatagtgtagcggtt

SEQ ID NO: 49477 - DNA, 21 bp, synthetic construct
  misc_feature 1..21: note = Probe
  source 1..21: mol_type = other DNA
ggttccatagtgtagcggtta

SEQ ID NO: 49478 - DNA, 22 bp, synthetic construct
  misc_feature 1..22: note = Probe
  source 1..22: mol_type = other DNA
ggttccatagtgtagcggttat

SEQ ID NO: 49479 - DNA, 24 bp, synthetic construct
  misc_feature 1..24: note = Probe
  source 1..24: mol_type = other DNA
ggttccatagtgtagcggttatca

SEQ ID NO: 49480 - DNA, 25 bp, synthetic construct
  misc_feature 1..25: note = Probe
  source 1..25: mol_type = other DNA
ggttccatagtgtagcggttatcac

SEQ ID NO: 49481 - DNA, 26 bp, synthetic construct
  misc_feature 1..26: note = Probe
  source 1..26: mol_type = other DNA
ggttccatagtgtagcggttatcacg

SEQ ID NO: 49482 - DNA, 29 bp, synthetic construct
  misc_feature 1..29: note = Probe
  source 1..29: mol_type = other DNA
ggttccatagtgtagcggttatcacgtct

SEQ ID NO: 49483 - DNA, 30 bp, synthetic construct; identical to SEQ ID NO: 8720
  misc_feature 1..30: note = Probe
  source 1..30: mol_type = other DNA

SEQ ID NO: 49484 - DNA, 35 bp, synthetic construct; identical to SEQ ID NO: 22300
  misc_feature 1..35: note = Probe
  source 1..35: mol_type = other DNA

SEQ ID NO: 49485 - DNA, 36 bp, synthetic construct; identical to SEQ ID NO: 1436
  misc_feature 1..36: note = Probe
  source 1..36: mol_type = other DNA

SEQ ID NO: 49486 - DNA, 40 bp, synthetic construct; identical to SEQ ID NO: 22303
  misc_feature 1..40: note = Probe
  source 1..40: mol_type = other DNA

SEQ ID NO: 49487 - DNA, 49 bp, synthetic construct
  misc_feature 1..49: note = Probe
  source 1..49: mol_type = other DNA
ggttccatagtgtagcggttatcacgtctgctttacacgcagaaggtcc

SEQ ID NO: 49488 - DNA, 16 bp, synthetic construct
  misc_feature 1..16: note = Probe
  source 1..16: mol_type = other DNA
ggttccatagtgtagt

SEQ ID NO: 49489 - DNA, 17 bp, synthetic construct
  misc_feature 1..17: note = Probe
  source 1..17: mol_type = other DNA
ggttccatagtgtagtg

SEQ ID NO: 49490 - DNA, 18 bp, synthetic construct
  misc_feature 1..18: note = Probe
  source 1..18: mol_type = other DNA
ggttccatagtgtagtgg

SEQ ID NO: 49491 - DNA, 19 bp, synthetic construct
  misc_feature 1..19: note = Probe
  source 1..19: mol_type = other DNA
ggttccatagtgtagtggt

SEQ ID NO: 49492 - DNA, 20 bp, synthetic construct
  misc_feature 1..20: note = Probe
  source 1..20: mol_type = other DNA
ggttccatagtgtagtggtt

SEQ ID NO: 49493 - DNA, 21 bp, synthetic construct
  misc_feature 1..21: note = Probe
  source 1..21: mol_type = other DNA
ggttccatagtgtagtggtta

SEQ ID NO: 49494 - DNA, 26 bp, synthetic construct
  misc_feature 1..26: note = Probe
  source 1..26: mol_type = other DNA
ggttccatagtgtagtggttatcaca

SEQ ID NO: 49495 - DNA, 28 bp, synthetic construct
  misc_feature 1..28: note = Probe
  source 1..28: mol_type = other DNA
ggttccatagtgtagtggttatcacatc

SEQ ID NO: 49496 - DNA, 30 bp, synthetic construct; identical to SEQ ID NO: 11085
  misc_feature 1..30: note = Probe
  source 1..30: mol_type = other DNA

SEQ ID NO: 49497 - DNA, 50 bp, synthetic construct; identical to SEQ ID NO: 13981
  misc_feature 1..50: note = Probe
  source 1..50: mol_type = other DNA

SEQ ID NO: 49498 - DNA, 27 bp, synthetic construct
  misc_feature 1..27: note = Probe
  source 1..27: mol_type = other DNA
ggttccatagtgtagtggttatcacgt

SEQ ID NO: 49499 - DNA, 35 bp, synthetic construct; identical to SEQ ID NO: 6817
  misc_feature 1..35: note = Probe
  source 1..35: mol_type = other DNA

SEQ ID NO: 49500 - DNA, 37 bp, synthetic construct; identical to SEQ ID NO: 6818
  misc_feature 1..37: note = Probe
  source 1..37: mol_type = other DNA

SEQ ID NO: 49501 - DNA, 38 bp, synthetic construct; identical to SEQ ID NO: 22313
  misc_feature 1..38: note = Probe
  source 1..38: mol_type = other DNA

SEQ ID NO: 49502 - DNA, 40 bp, synthetic construct; identical to SEQ ID NO: 13994
  misc_feature 1..40: note = Probe
  source 1..40: mol_type = other DNA

SEQ ID NO: 49503 - DNA, 23 bp, synthetic construct
  misc_feature 1..23: note = Probe
  source 1..23: mol_type = other DNA
ggttccatggtgtaatggttagc

SEQ ID NO: 49504 - DNA, 30 bp, synthetic construct; identical to SEQ ID NO: 6826
  misc_feature 1..30: note = Probe
  source 1..30: mol_type = other DNA

SEQ ID NO: 49505 - DNA, 31 bp, synthetic construct; identical to SEQ ID NO: 22321
  misc_feature 1..31: note = Probe
  source 1..31: mol_type = other DNA

SEQ ID NO: 49506 - DNA, 34 bp, synthetic construct; identical to SEQ ID NO: 1459
  misc_feature 1..34: note = Probe
  source 1..34: mol_type = other DNA

SEQ ID NO: 49507 - DNA, 27 bp, synthetic construct
  misc_feature 1..27: note = Probe
  source 1..27: mol_type = other DNA
ggttccgggttcgagtcccggcggagt

SEQ ID NO: 49508 - DNA, 25 bp, synthetic construct
  misc_feature 1..25: note = Probe
  source 1..25: mol_type = other DNA
ggttcgaaaccgggcggaaacacct

SEQ ID NO: 49509 - DNA, 25 bp, synthetic construct
  misc_feature 1..25: note = Probe
  source 1..25: mol_type = other DNA
ggttcgaaccccgtccgtgcctgat

SEQ ID NO: 49510 - DNA, 24 bp, synthetic construct
  misc_feature 1..24: note = Probe
  source 1..24: mol_type = other DNA
ggttcgaatcccaccgctgccaca

SEQ ID NO: 49511 - DNA, 25 bp, synthetic construct
  misc_feature 1..25: note = Probe
  source 1..25: mol_type = other DNA
ggttcgaatcccaccgctgccacac

SEQ ID NO: 49512 - DNA, 25 bp, synthetic construct
  misc_feature 1..25: note = Probe
  source 1..25: mol_type = other DNA
ggttcgaatcccaccgctgccaggt

SEQ ID NO: 49513 - DNA, 22 bp, synthetic construct
  misc_feature 1..22: note = Probe
  source 1..22: mol_type = other DNA
ggttcgaatcccactcctgaca

SEQ ID NO: 49514 - DNA, 22 bp, synthetic construct
  misc_feature 1..22: note = Probe
  source 1..22: mol_type = other DNA
ggttcgaatcccacttctgaca

SEQ ID NO: 49515 - DNA, 24 bp, synthetic construct
  misc_feature 1..24: note = Probe
  source 1..24: mol_type = other DNA
ggttcgaatcccacttctgacaca

SEQ ID NO: 49516 - DNA, 25 bp, synthetic construct
  misc_feature 1..25: note = Probe
  source 1..25: mol_type = other DNA
ggttcgaatcccacttctgacacaa

SEQ ID NO: 49517 - DNA, 22 bp, synthetic construct
  misc_feature 1..22: note = Probe
  source 1..22: mol_type = other DNA
ggttcgaatcccagcggggcct

SEQ ID NO: 49518 - DNA, 23 bp, synthetic construct
  misc_feature 1..23: note = Probe
  source 1..23: mol_type = other DNA
ggttcgaatcccagcggggcctg

SEQ ID NO: 49519 - DNA, 23 bp, synthetic construct
  misc_feature 1..23: note = Probe
  source 1..23: mol_type = other DNA
ggttcgaatcccagcggggcctt

SEQ ID NO: 49520 - DNA, 22 bp, synthetic construct
  misc_feature 1..22: note = Probe
  source 1..22: mol_type = other DNA
ggttcgaatcccagcggtgcct

SEQ ID NO: 49521 - DNA, 25 bp, synthetic construct
  misc_feature 1..25: note = Probe
  source 1..25: mol_type = other DNA
ggttcgaatcccagcggtgcctccg

SEQ ID NO: 49522 - DNA, 20 bp, synthetic construct
  misc_feature 1..20: note = Probe
  source 1..20: mol_type = other DNA
ggttcgaatcccatcctcgt

SEQ ID NO: 49523 - DNA, 23 bp, synthetic construct
  misc_feature 1..23: note = Probe
  source 1..23: mol_type = other DNA
ggttcgaatcccatcctcgtcgc

SEQ ID NO: 49524 - DNA, 24 bp, synthetic construct
  misc_feature 1..24: note = Probe
  source 1..24: mol_type = other DNA
ggttcgaatcccatcctcgtcgct

SEQ ID NO: 49525 - DNA, 23 bp, synthetic construct
  misc_feature 1..23: note = Probe
  source 1..23: mol_type = other DNA
ggttcgaatcctgccgactacga

SEQ ID NO: 49526 - DNA, 23 bp, synthetic construct
  misc_feature 1..23: note = Probe
  source 1..23: mol_type = other DNA
ggttcgaatcctgccgactacgg

SEQ ID NO: 49527 - DNA, 25 bp, synthetic construct
  misc_feature 1..25: note = Probe
  source 1..25: mol_type = other DNA
ggttcgaatcctgccgactacggca

SEQ ID NO: 49528 - DNA, 23 bp, synthetic construct
  misc_feature 1..23: note = Probe
  source 1..23: mol_type = other DNA
ggttcgaatcctgccgactacgt

SEQ ID NO: 49529 - DNA, 25 bp, synthetic construct
  misc_feature 1..25: note = Probe
  source 1..25: mol_type = other DNA
ggttcgaatcctgccgactacgtca

SEQ ID NO: 49530 - DNA, 25 bp, synthetic construct
  misc_feature 1..25: note = Probe
  source 1..25: mol_type = other DNA
ggttcgaatcctgctcacagcgtca

SEQ ID NO: 49531 - DNA, 25 bp, synthetic construct
  misc_feature 1..25: note = Probe
  source 1..25: mol_type = other DNA
ggttcgactcccggtatgggaacaa

SEQ ID NO: 49532 - DNA, 20 bp, synthetic construct
  misc_feature 1..20: note = Probe
  source 1..20: mol_type = other DNA
ggttcgagcccacccaggga

SEQ ID NO: 49533 - DNA, 24 bp, synthetic construct
  misc_feature 1..24: note = Probe
  source 1..24: mol_type = other DNA
ggttcgagcccacccagggacgcc

SEQ ID NO: 49534 - DNA, 25 bp, synthetic construct
  misc_feature 1..25: note = Probe
  source 1..25: mol_type = other DNA
ggttcgagcccacccagggacgcct

SEQ ID NO: 49535 - DNA, 25 bp, synthetic construct
  misc_feature 1..25: note = Probe
  source 1..25: mol_type = other DNA
ggttcgagccccacgttgggcggca

SEQ ID NO: 49536 - DNA, 24 bp, synthetic construct
  misc_feature 1..24: note = Probe
  source 1..24: mol_type = other DNA
ggttcgagtcccatctggggtggc

SEQ ID NO: 49537 - DNA, 24 bp, synthetic construct
  misc_feature 1..24: note = Probe
  source 1..24: mol_type = other DNA
ggttcgagtcccatctgggtcgcg

SEQ ID NO: 49538 - DNA, 25 bp, synthetic construct
  misc_feature 1..25: note = Probe
  source 1..25: mol_type = other DNA
ggttcgagtcccatctgggtcgcgt

SEQ ID NO: 49539 - DNA, 20 bp, synthetic construct
  misc_feature 1..20: note = Probe
  source 1..20: mol_type = other DNA
ggttcgagtcccttcgtggt

SEQ ID NO: 49540 - DNA, 24 bp, synthetic construct
  misc_feature 1..24: note = Probe
  source 1..24: mol_type = other DNA
ggttcgagtcccttcgtggtcgtc

SEQ ID NO: 49541 - DNA, 25 bp, synthetic construct
  misc_feature 1..25: note = Probe
  source 1..25: mol_type = other DNA
ggttcgagtcccttcgtggtcgttg

SEQ ID NO: 49542 - DNA, 22 bp, synthetic construct
  misc_feature 1..22: note = Probe
  source 1..22: mol_type = other DNA
ggttcgatccccagcatctcca

SEQ ID NO: 49543 - DNA, 25 bp, synthetic construct
  misc_feature 1..25: note = Probe
  source 1..25: mol_type = other DNA
ggttcgatccccagcatctccagtg

SEQ ID NO: 49544 - DNA, 25 bp, synthetic construct
  misc_feature 1..25: note = Probe
  source 1..25: mol_type = other DNA
ggttcgatccccggcatctccattg

SEQ ID NO: 49545 - DNA, 25 bp, synthetic construct
  misc_feature 1..25: note = Probe
  source 1..25: mol_type = other DNA
ggttcgatccccgtacgggccacga

SEQ ID NO: 49546 - DNA, 25 bp, synthetic construct
  misc_feature 1..25: note = Probe
  source 1..25: mol_type = other DNA
ggttcgatccccgtactggccacgt

SEQ ID NO: 49547 - DNA, 25 bp, synthetic construct
  misc_feature 1..25: note = Probe
  source 1..25: mol_type = other DNA
ggttcgatcccgggcggaaacaggt

SEQ ID NO: 49548 - DNA, 23 bp, synthetic construct
  misc_feature 1..23: note = Probe
  source 1..23: mol_type = other DNA
ggttcgattccccgacggggaga

SEQ ID NO: 49549 - DNA, 24 bp, synthetic construct
  misc_feature 1..24: note = Probe
  source 1..24: mol_type = other DNA
ggttcgattccccgacggggagac

SEQ ID NO: 49550 - DNA, 23 bp, synthetic construct
  misc_feature 1..23: note = Probe
  source 1..23: mol_type = other DNA
ggttcgattccccgacggggagg

SEQ ID NO: 49551 - DNA, 24 bp, synthetic construct
  misc_feature 1..24: note = Probe
  source 1..24: mol_type = other DNA
ggttcgattccccgacggggaggc

SEQ ID NO: 49552 - DNA, 25 bp, synthetic construct
  misc_feature 1..25: note = Probe
  source 1..25: mol_type = other DNA
ggttcgattccccgacggggaggca

SEQ ID NO: 49553 - DNA, 22 bp, synthetic construct
  misc_feature 1..22: note = Probe
  source 1..22: mol_type = other DNA
ggttcgattcccggccaatgca

SEQ ID NO: 49554 - DNA, 25 bp, synthetic construct
  misc_feature 1..25: note = Probe
  source 1..25: mol_type = other DNA
ggttcgattcccggccaatgcacga

SEQ ID NO: 49555 - DNA, 25 bp, synthetic construct
  misc_feature 1..25: note = Probe
  source 1..25: mol_type = other DNA
ggttcgattcccggccaatgcagca

SEQ ID NO: 49556 - DNA, 25 bp, synthetic construct
  misc_feature 1..25: note = Probe
  source 1..25: mol_type = other DNA
ggttcgattcccgggcggcgcactt

SEQ ID NO: 49557 - DNA, 24 bp, synthetic construct
  misc_feature 1..24: note = Probe
  source 1..24: mol_type = other DNA
ggttcgattccttccttttttgtc

SEQ ID NO: 49558 - DNA, 23 bp, synthetic construct
  misc_feature 1..23: note = Probe
  source 1..23: mol_type = other DNA
ggttcgattctcatagtcctaga

SEQ ID NO: 49559 - DNA, 24 bp, synthetic construct
  misc_feature 1..24: note = Probe
  source 1..24: mol_type = other DNA
ggttcgattctcatagtcctagaa

SEQ ID NO: 49560 - DNA, 25 bp, synthetic construct
  misc_feature 1..25: note = Probe
  source 1..25: mol_type = other DNA
ggttcgattctcatagtcctagaaa

SEQ ID NO: 49561 - DNA, 32 bp, synthetic construct
  misc_feature 1..32: note = Probe
  source 1..32: mol_type = other DNA
ggttgcgtgttcaaatcacgtcggggtcaaca

SEQ ID NO: 49562 - DNA, 50 bp, synthetic construct
  misc_feature 1..50: note = Probe
  source 1..50: mol_type = other DNA
ggttggcttgaaaccagctttggggggttcgattccttccttttttgtct

SEQ ID NO: 49563 - DNA, 30 bp, synthetic construct; identical to SEQ ID NO: 11143
  misc_feature 1..30: note = Probe
  source 1..30: mol_type = other DNA

SEQ ID NO: 49564 - DNA, 16 bp, synthetic construct
  misc_feature 1..16: note = Probe
  source 1..16: mol_type = other DNA
ggttgtagtccgtgcg

SEQ ID NO: 49565 - DNA, 18 bp, synthetic construct
  misc_feature 1..18: note = Probe
  source 1..18: mol_type = other DNA
ggttgtagtccgtgcgag

SEQ ID NO: 49566 - DNA, 20 bp, synthetic construct
  misc_feature 1..20: note = Probe
  source 1..20: mol_type = other DNA
ggttgtagtccgtgcgagaa

SEQ ID NO: 49567 - DNA, 21 bp, synthetic construct
  misc_feature 1..21: note = Probe
  source 1..21: mol_type = other DNA
ggttgtagtccgtgcgagaat

SEQ ID NO: 49568 - DNA, 22 bp, synthetic construct
  misc_feature 1..22: note = Probe
  source 1..22: mol_type = other DNA
ggttgtagtccgtgcgagaata

SEQ ID NO: 49569 - DNA, 25 bp, synthetic construct
  misc_feature 1..25: note = Probe
  source 1..25: mol_type = other DNA
ggttgtagtccgtgcgagaataatg

SEQ ID NO: 49570 - DNA, 29 bp, synthetic construct
  misc_feature 1..29: note = Probe
  source 1..29: mol_type = other DNA
ggttgtgagttcgagcctcacctggagca

SEQ ID NO: 49571 - DNA, 32 bp, synthetic construct
  misc_feature 1..32: note = Probe
  source 1..32: mol_type = other DNA
ggttgtgagttcgagcctcacctggagcattg

SEQ ID NO: 49572 - DNA, 19 bp, synthetic construct
  misc_feature 1..19: note = Probe
  source 1..19: mol_type = other DNA
ggtttaagtcccattggtc

SEQ ID NO: 49573 - DNA, 20 bp, synthetic construct
  misc_feature 1..20: note = Probe
  source 1..20: mol_type = other DNA
ggtttaagtcccattggtct

SEQ ID NO: 49574 - DNA, 24 bp, synthetic construct
  misc_feature 1..24: note = Probe
  source 1..24: mol_type = other DNA
ggtttaagtcccattggtctagta

SEQ ID NO: 49575 - DNA, 32 bp, synthetic construct; identical to SEQ ID NO: 41092
  misc_feature 1..32: note = Probe
  source 1..32: mol_type = other DNA

SEQ ID NO: 49576 - DNA, 34 bp, synthetic construct; identical to SEQ ID NO: 22371
  misc_feature 1..34: note = Probe
  source 1..34: mol_type = other DNA

SEQ ID NO: 49577 - DNA, 26 bp, synthetic construct
  misc_feature 1..26: note = Probe
  source 1..26: mol_type = other DNA
ggtttggtcctagcctttctattagc

SEQ ID NO: 49578 - DNA, 29 bp, synthetic construct
  misc_feature 1..29: note = Probe
  source 1..29: mol_type = other DNA
ggtttttcatatcattggtcgtggttgta

SEQ ID NO: 49579 - DNA, 33 bp, synthetic construct; identical to SEQ ID NO: 6869
  misc_feature 1..33: note = Probe
  source 1..33: mol_type = other DNA

SEQ ID NO: 49580 - DNA, 35 bp, synthetic construct; identical to SEQ ID NO: 32770
  misc_feature 1..35: note = Probe
  source 1..35: mol_type = other DNA

SEQ ID NO: 49581 - DNA, 37 bp, synthetic construct; identical to SEQ ID NO: 32771
  misc_feature 1..37: note = Probe
  source 1..37: mol_type = other DNA

SEQ ID NO: 49582 - DNA, 38 bp, synthetic construct; identical to SEQ ID NO: 6871
  misc_feature 1..38: note = Probe
  source 1..38: mol_type = other DNA

SEQ ID NO: 49583 - DNA, 41 bp, synthetic construct; identical to SEQ ID NO: 25537
  misc_feature 1..41: note = Probe
  source 1..41: mol_type = other DNA

SEQ ID NO: 49584 - DNA, 42 bp, synthetic construct; identical to SEQ ID NO: 25538
  misc_feature 1..42: note = Probe
  source 1..42: mol_type = other DNA

SEQ ID NO: 49585 - DNA, 44 bp, synthetic construct; identical to SEQ ID NO: 32776
  misc_feature 1..44: note = Probe
  source 1..44: mol_type = other DNA

SEQ ID NO: 49586 - DNA, 45 bp, synthetic construct
  misc_feature 1..45: note = Probe
  source 1..45: mol_type = other DNA
ggtttttcatatcattggtcgtggttgtagtccgtgcgagaataa

SEQ ID NO: 49587 - DNA, 46 bp, synthetic construct; identical to SEQ ID NO: 32777
  misc_feature 1..46: note = Probe
  source 1..46: mol_type = other DNA

SEQ ID NO: 49588 - DNA, 50 bp, synthetic construct; identical to SEQ ID NO: 6872
  misc_feature 1..50: note = Probe
  source 1..50: mol_type = other DNA

SEQ ID NO: 49589 - DNA, 39 bp, synthetic construct
  misc_feature 1..39: note = Probe
  source 1..39: mol_type = other DNA
gtaaacaggagatcctgggttcgaatcccagcggtgcct

SEQ ID NO: 49590 - DNA, 42 bp, synthetic construct; identical to SEQ ID NO: 6874
  misc_feature 1..42: note = Probe
  source 1..42: mol_type = other DNA

SEQ ID NO: 49591 - DNA, 42 bp, synthetic construct; identical to SEQ ID NO: 22391
  misc_feature 1..42: note = Probe
  source 1..42: mol_type = other DNA

SEQ ID NO: 49592 - DNA, 42 bp, synthetic construct; identical to SEQ ID NO: 6876
  misc_feature 1..42: note = Probe
  source 1..42: mol_type = other DNA

SEQ ID NO: 49593 - DNA, 32 bp, synthetic construct; identical to SEQ ID NO: 6877
  misc_feature 1..32: note = Probe
  source 1..32: mol_type = other DNA

SEQ ID NO: 49594 - DNA, 34 bp, synthetic construct; identical to SEQ ID NO: 1464
  misc_feature 1..34: note = Probe
  source 1..34: mol_type = other DNA

SEQ ID NO: 49595 - DNA, 36 bp, synthetic construct; identical to SEQ ID NO: 6879
  misc_feature 1..36: note = Probe
  source 1..36: mol_type = other DNA

SEQ ID NO: 49596 - DNA, 37 bp, synthetic construct; identical to SEQ ID NO: 6880
  misc_feature 1..37: note = Probe
  source 1..37: mol_type = other DNA

SEQ ID NO: 49597 - DNA, 36 bp, synthetic construct; identical to SEQ ID NO: 22401
  misc_feature 1..36: note = Probe
  source 1..36: mol_type = other DNA

SEQ ID NO: 49598 - DNA, 42 bp, synthetic construct; identical to SEQ ID NO: 6884
  misc_feature 1..42: note = Probe
  source 1..42: mol_type = other DNA

SEQ ID NO: 49599 - DNA, 45 bp, synthetic construct; identical to SEQ ID NO: 6886
  misc_feature 1..45: note = Probe
  source 1..45: mol_type = other DNA

SEQ ID NO: 49600 - DNA, 30 bp, synthetic construct; identical to SEQ ID NO: 6891
  misc_feature 1..30: note = Probe
  source 1..30: mol_type = other DNA

SEQ ID NO: 49601 - DNA, 31 bp, synthetic construct; identical to SEQ ID NO: 6892
  misc_feature 1..31: note = Probe
  source 1..31: mol_type = other DNA

SEQ ID NO: 49602 - DNA, 33 bp, synthetic construct; identical to SEQ ID NO: 6894
  misc_feature 1..33: note = Probe
  source 1..33: mol_type = other DNA

SEQ ID NO: 49603 - DNA, 34 bp, synthetic construct; identical to SEQ ID NO: 6895
  misc_feature 1..34: note = Probe
  source 1..34: mol_type = other DNA

SEQ ID NO: 49604 - DNA, 36 bp, synthetic construct; identical to SEQ ID NO: 6897
  misc_feature 1..36: note = Probe
  source 1..36: mol_type = other DNA

SEQ ID NO: 49605 - DNA, 43 bp, synthetic construct; identical to SEQ ID NO: 6903
  misc_feature 1..43: note = Probe
  source 1..43: mol_type = other DNA

SEQ ID NO: 49606 - DNA, 44 bp, synthetic construct; identical to SEQ ID NO: 6904
  misc_feature 1..44: note = Probe
  source 1..44: mol_type = other DNA

SEQ ID NO: 49607 - DNA, 45 bp, synthetic construct; identical to SEQ ID NO: 6905
  misc_feature 1..45: note = Probe
  source 1..45: mol_type = other DNA

SEQ ID NO: 49608 - DNA, 46 bp, synthetic construct; identical to SEQ ID NO: 6906
  misc_feature 1..46: note = Probe
  source 1..46: mol_type = other DNA

SEQ ID NO: 49609 - DNA, 50 bp, synthetic construct; identical to SEQ ID NO: 6907
  misc_feature 1..50: note = Probe
  source 1..50: mol_type = other DNA

SEQ ID NO: 49610 - DNA, 32 bp, synthetic construct; identical to SEQ ID NO: 22424
  misc_feature 1..32: note = Probe
  source 1..32: mol_type = other DNA

SEQ ID NO: 49611 - DNA, 16 bp, synthetic construct
  misc_feature 1..16: note = Probe
  source 1..16: mol_type = other DNA
gtaccgttaacttcca

SEQ ID NO: 49612 - DNA, 26 bp, synthetic construct
  misc_feature 1..26: note = Probe
  source 1..26: mol_type = other DNA
gtaccgttaacttccaattaactagt

SEQ ID NO: 49613 - DNA, 27 bp, synthetic construct
  misc_feature 1..27: note = Probe
  source 1..27: mol_type = other DNA
gtaccgttaacttccaattaactagtt

SEQ ID NO: 49614 - DNA, 32 bp, synthetic construct; identical to SEQ ID NO: 22428
  misc_feature 1..32: note = Probe
  source 1..32: mol_type = other DNA

SEQ ID NO: 49615 - DNA, 36 bp, synthetic construct; identical to SEQ ID NO: 22429
  misc_feature 1..36: note = Probe
  source 1..36: mol_type = other DNA

SEQ ID NO: 49616 - DNA, 50 bp, synthetic construct; identical to SEQ ID NO: 1465
  misc_feature 1..50: note = Probe
  source 1..50: mol_type = other DNA

SEQ ID NO: 49617 - DNA, 38 bp, synthetic construct; identical to SEQ ID NO: 6914
  misc_feature 1..38: note = Probe
  source 1..38: mol_type = other DNA

SEQ ID NO: 49618 - DNA, 35 bp, synthetic construct; identical to SEQ ID NO: 22441
  misc_feature 1..35: note = Probe
  source 1..35: mol_type = other DNA

SEQ ID NO: 49619 - DNA, 50 bp, synthetic construct; identical to SEQ ID NO: 22442
  misc_feature 1..50: note = Probe
  source 1..50: mol_type = other DNA

SEQ ID NO: 49620 - DNA, 50 bp, synthetic construct
  misc_feature 1..50: note = Probe
  source 1..50: mol_type = other DNA
gtagagcatgagactcttaatctcagggtcgtgggttcgagccccacgtt

SEQ ID NO: 49621 - DNA, 50 bp, synthetic construct
  misc_feature 1..50: note = Probe
  source 1..50: mol_type = other DNA
gtagagcatgggactcttaatcccagggtcgtgggttcgagccccacgtt

SEQ ID NO: 49622 - DNA, 32 bp, synthetic construct; identical to SEQ ID NO: 22449
  misc_feature 1..32: note = Probe
  source 1..32: mol_type = other DNA

SEQ ID NO: 49623 - DNA, 27 bp, synthetic construct
  misc_feature 1..27: note = Probe
  source 1..27: mol_type = other DNA
gtagctcagtggtagagcgcatgcttt

SEQ ID NO: 49624 - DNA, 19 bp, synthetic construct
  misc_feature 1..19: note = Probe
  source 1..19: mol_type = other DNA
gtagtccgtgcgagaataa

SEQ ID NO: 49625 - DNA, 21 bp, synthetic construct
  misc_feature 1..21: note = Probe
  source 1..21: mol_type = other DNA
gtagtccgtgcgagaataatg

SEQ ID NO: 49626 - DNA, 16 bp, synthetic construct
  misc_feature 1..16: note = Probe
  source 1..16: mol_type = other DNA
gtagtcgtggccgagt

SEQ ID NO: 49627 - DNA, 18 bp, synthetic construct
  misc_feature 1..18: note = Probe
  source 1..18: mol_type = other DNA
gtagtcgtggccgagtgg

SEQ ID NO: 49628 - DNA, 25 bp, synthetic construct
  misc_feature 1..25: note = Probe
  source 1..25: mol_type = other DNA
gtagtcgtggccgagtggttaaggc

SEQ ID NO: 49629 - DNA, 17 bp, synthetic construct
  misc_feature 1..17: note = Probe
  source 1..17: mol_type = other DNA
gtagtggttatcacgtt

SEQ ID NO: 49630 - DNA, 26 bp, synthetic construct
  misc_feature 1..26: note = Probe
  source 1..26: mol_type = other DNA
gtagtgtagtggttatcacgttcgcc

SEQ ID NO: 49631 - DNA, 50 bp, synthetic construct
  misc_feature 1..50: note = Probe
  source 1..50: mol_type = other DNA
gtagtgtagtggttatcacgttcgcctcacacgcgaaaggtccccggttc

SEQ ID NO: 49632 - DNA, 22 bp, synthetic construct
  misc_feature 1..22: note = Probe
  source 1..22: mol_type = other DNA
gtatagtggtgagtatccccgc

SEQ ID NO: 49633 - DNA, 26 bp, synthetic construct
  misc_feature 1..26: note = Probe
  source 1..26: mol_type = other DNA
gtatagtggtgagtatccccgcctgt

SEQ ID NO: 49634 - DNA, 50 bp, synthetic construct; identical to SEQ ID NO: 41131
  misc_feature 1..50: note = Probe
  source 1..50: mol_type = other DNA

SEQ ID NO: 49635 - DNA, 38 bp, synthetic construct; identical to SEQ ID NO: 22501
  misc_feature 1..38: note = Probe
  source 1..38: mol_type = other DNA

SEQ ID NO: 49636 - DNA, 38 bp, synthetic construct; identical to SEQ ID NO: 6928
  misc_feature 1..38: note = Probe
  source 1..38: mol_type = other DNA

SEQ ID NO: 49637 - DNA, 32 bp, synthetic construct
  misc_feature 1..32: note = Probe
  source 1..32: mol_type = other DNA
gtcaaagttaaattataggctaaatcctatat

SEQ ID NO: 49638 - DNA, 33 bp, synthetic construct; identical to SEQ ID NO: 6938
  misc_feature 1..33: note = Probe
  source 1..33: mol_type = other DNA

SEQ ID NO: 49639 - DNA, 35 bp, synthetic construct
  misc_feature 1..35: note = Probe
  source 1..35: mol_type = other DNA
gtcaaagttaaattataggctaaatcctatatatc

SEQ ID NO: 49640 - DNA, 36 bp, synthetic construct; identical to SEQ ID NO: 22531
  misc_feature 1..36: note = Probe
  source 1..36: mol_type = other DNA

SEQ ID NO: 49641 - DNA, 39 bp, synthetic construct
  misc_feature 1..39: note = Probe
  source 1..39: mol_type = other DNA
gtcaaagttaaattataggctaaatcctatatatcttaa

SEQ ID NO: 49642 - DNA, 40 bp, synthetic construct; identical to SEQ ID NO: 22533
  misc_feature 1..40: note = Probe
  source 1..40: mol_type = other DNA

SEQ ID NO: 49643 - DNA, 41 bp, synthetic construct; identical to SEQ ID NO: 22534
  misc_feature 1..41: note = Probe
  source 1..41: mol_type = other DNA

SEQ ID NO: 49644 - DNA, 43 bp, synthetic construct; identical to SEQ ID NO: 22535
  misc_feature 1..43: note = Probe
  source 1..43: mol_type = other DNA

SEQ ID NO: 49645 - DNA, 44 bp, synthetic construct
  misc_feature 1..44: note = Probe
  source 1..44: mol_type = other DNA
gtcaaagttaaattataggctaaatcctatatatcttaatggca

SEQ ID NO: 49646 - DNA, 21 bp, synthetic construct
  misc_feature 1..21: note = Probe
  source 1..21: mol_type = other DNA
gtcacgcgggagaccggggtt

SEQ ID NO: 49647 - DNA, 42 bp, synthetic construct; identical to SEQ ID NO: 6945
  misc_feature 1..42: note = Probe
  source 1..42: mol_type = other DNA

SEQ ID NO: 49648 - DNA, 33 bp, synthetic construct; identical to SEQ ID NO: 14031
  misc_feature 1..33: note = Probe
  source 1..33: mol_type = other DNA

SEQ ID NO: 49649 - DNA, 35 bp, synthetic construct; identical to SEQ ID NO: 14033
  misc_feature 1..35: note = Probe
  source 1..35: mol_type = other DNA

SEQ ID NO: 49650 - DNA, 36 bp, synthetic construct; identical to SEQ ID NO: 14034
  misc_feature 1..36: note = Probe
  source 1..36: mol_type = other DNA

SEQ ID NO: 49651 - DNA, 40 bp, synthetic construct; identical to SEQ ID NO: 6946
  misc_feature 1..40: note = Probe
  source 1..40: mol_type = other DNA

SEQ ID NO: 49652 - DNA, 50 bp, synthetic construct; identical to SEQ ID NO: 41148
  misc_feature 1..50: note = Probe
  source 1..50: mol_type = other DNA

SEQ ID NO: 49653 - DNA, 42 bp, synthetic construct; identical to SEQ ID NO: 22552
  misc_feature 1..42: note = Probe
  source 1..42: mol_type = other DNA

SEQ ID NO: 49654 - DNA, 42 bp, synthetic construct; identical to SEQ ID NO: 22553
  misc_feature 1..42: note = Probe
  source 1..42: mol_type = other DNA

SEQ ID NO: 49655 - DNA, 40 bp, synthetic construct; identical to SEQ ID NO: 6948
  misc_feature 1..40: note = Probe
  source 1..40: mol_type = other DNA

SEQ ID NO: 49656 - DNA, 42 bp, synthetic construct; identical to SEQ ID NO: 6950
  misc_feature 1..42: note = Probe
  source 1..42: mol_type = other DNA

SEQ ID NO: 49657 - DNA, 50 bp, synthetic construct; identical to SEQ ID NO: 6952
  misc_feature 1..50: note = Probe
  source 1..50: mol_type = other DNA

SEQ ID NO: 49658 - DNA, 45 bp, synthetic construct
  misc_feature 1..45: note = Probe
  source 1..45: mol_type = other DNA
gtcacgcgggagaccggggttcgattccccgacggggaggccggg

SEQ ID NO: 49659 - DNA, 16 bp, synthetic construct
  misc_feature 1..16: note = Probe
  source 1..16: mol_type = other DNA
gtcacggtggccgagt

SEQ ID NO: 49660 - DNA, 18 bp, synthetic construct
  misc_feature 1..18: note = Probe
  source 1..18: mol_type = other DNA
gtcacggtggccgagtgg

SEQ ID NO: 49661 - DNA, 22 bp, synthetic construct
  misc_feature 1..22: note = Probe
  source 1..22: mol_type = other DNA
gtcagaggttcaattcctcttc

SEQ ID NO: 49662 - DNA, 24 bp, synthetic construct
  misc_feature 1..24: note = Probe
  source 1..24: mol_type = other DNA
gtcagaggttcaattcctcttctt

SEQ ID NO: 49663 - DNA, 28 bp, synthetic construct
  misc_feature 1..28: note = Probe
  source 1..28: mol_type = other DNA
gtcagaggttcaattcctcttcttaaca

SEQ ID NO: 49664 - DNA, 30 bp, synthetic construct; identical to SEQ ID NO: 22564
  misc_feature 1..30: note = Probe
  source 1..30: mol_type = other DNA

SEQ ID NO: 49665 - DNA, 31 bp, synthetic construct; identical to SEQ ID NO: 6959
  misc_feature 1..31: note = Probe
  source 1..31: mol_type = other DNA

SEQ ID NO: 49666 - DNA, 26 bp, synthetic construct
  misc_feature 1..26: note = Probe
  source 1..26: mol_type = other DNA
gtcagctaaataagctatcgggccca

SEQ ID NO: 49667 - DNA, 27 bp, synthetic construct
  misc_feature 1..27: note = Probe
  source 1..27: mol_type = other DNA
gtcagctaaataagctatcgggcccat

SEQ ID NO: 49668 - DNA, 28 bp, synthetic construct
  misc_feature 1..28: note = Probe
  source 1..28: mol_type = other DNA
gtcagctaaataagctatcgggcccata

SEQ ID NO: 49669 - DNA, 29 bp, synthetic construct
  misc_feature 1..29: note = Probe
  source 1..29: mol_type = other DNA
gtcagctaaataagctatcgggcccatac

SEQ ID NO: 49670 - DNA, 32 bp, synthetic construct; identical to SEQ ID NO: 6965
  misc_feature 1..32: note = Probe
  source 1..32: mol_type = other DNA

SEQ ID NO: 49671 - DNA, 37 bp, synthetic construct; identical to SEQ ID NO: 6968
  misc_feature 1..37: note = Probe
  source 1..37: mol_type = other DNA

SEQ ID NO: 49672 - DNA, 38 bp, synthetic construct; identical to SEQ ID NO: 6969
  misc_feature 1..38: note = Probe
  source 1..38: mol_type = other DNA

SEQ ID NO: 49673 - DNA, 39 bp, synthetic construct; identical to SEQ ID NO: 6970
  misc_feature 1..39: note = Probe
  source 1..39: mol_type = other DNA

SEQ ID NO: 49674 - DNA, 40 bp, synthetic construct; identical to SEQ ID NO: 6971
  misc_feature 1..40: note = Probe
  source 1..40: mol_type = other DNA

SEQ ID NO: 49675 - DNA, 41 bp, synthetic construct; identical to SEQ ID NO: 6972
  misc_feature 1..41: note = Probe
  source 1..41: mol_type = other DNA

SEQ ID NO: 49676 - DNA, 42 bp, synthetic construct
  misc_feature 1..42: note = Probe
  source 1..42: mol_type = other DNA
gtcagctaaataagctatcgggcccataccccgaaaatgttg

SEQ ID NO: 49677 - DNA, 43 bp, synthetic construct; identical to SEQ ID NO: 6973
  misc_feature 1..43: note = Probe
  source 1..43: mol_type = other DNA

SEQ ID NO: 49678 - DNA, 44 bp, synthetic construct; identical to SEQ ID NO: 6974
  misc_feature 1..44: note = Probe
  source 1..44: mol_type = other DNA

SEQ ID NO: 49679 - DNA, 45 bp, synthetic construct; identical to SEQ ID NO: 6975
  misc_feature 1..45: note = Probe
  source 1..45: mol_type = other DNA

SEQ ID NO: 49680 - DNA, 23 bp, synthetic construct
  misc_feature 1..23: note = Probe
  source 1..23: mol_type = other DNA
gtcagctgtttttcctaaccgga

SEQ ID NO: 49681 - DNA, 16 bp, synthetic construct
  misc_feature 1..16: note = Probe
  source 1..16: mol_type = other DNA
gtcaggatggccgagc

SEQ ID NO: 49682 - DNA, 17 bp, synthetic construct
  misc_feature 1..17: note = Probe
  source 1..17: mol_type = other DNA
gtcaggatggccgagcg

SEQ ID NO: 49683 - DNA, 18 bp, synthetic construct
  misc_feature 1..18: note = Probe
  source 1..18: mol_type = other DNA
gtcaggatggccgagcgg

SEQ ID NO: 49684 - DNA, 19 bp, synthetic construct
  misc_feature 1..19: note = Probe
  source 1..19: mol_type = other DNA
gtcaggatggccgagcggt

SEQ ID NO: 49685 - DNA, 20 bp, synthetic construct
  misc_feature 1..20: note = Probe
  source 1..20: mol_type = other DNA
gtcaggatggccgagcggtc

SEQ ID NO: 49686 - DNA, 21 bp, synthetic construct
  misc_feature 1..21: note = Probe
  source 1..21: mol_type = other DNA
gtcaggatggccgagcggtct

SEQ ID NO: 49687 - DNA, 22 bp, synthetic construct
  misc_feature 1..22: note = Probe
  source 1..22: mol_type = other DNA
gtcaggatggccgagcggtcta

SEQ ID NO: 49688 - DNA, 23 bp, synthetic construct
  misc_feature 1..23: note = Probe
  source 1..23: mol_type = other DNA
gtcaggatggccgagcggtctaa

SEQ ID NO: 49689 - DNA, 24 bp, synthetic construct
  misc_feature 1..24: note = Probe
  source 1..24: mol_type = other DNA
gtcaggatggccgagcggtctaag

SEQ ID NO: 49690 - DNA, 25 bp, synthetic construct
  misc_feature 1..25: note = Probe
  source 1..25: mol_type = other DNA
gtcaggatggccgagcggtctaagg

SEQ ID NO: 49691 - DNA, 32 bp, synthetic construct; identical to SEQ ID NO: 6990
  misc_feature 1..32: note = Probe
  source 1..32: mol_type = other DNA

SEQ ID NO: 49692 - DNA, 34 bp, synthetic construct; identical to SEQ ID NO: 1479
  misc_feature 1..34: note = Probe
  source 1..34: mol_type = other DNA

SEQ ID NO: 49693 - DNA, 35 bp, synthetic construct; identical to SEQ ID NO: 1480
  misc_feature 1..35: note = Probe
  source 1..35: mol_type = other DNA

SEQ ID NO: 49694 - DNA, 16 bp, synthetic construct
  misc_feature 1..16: note = Probe
  source 1..16: mol_type = other DNA
gtcaggatggccgagt

SEQ ID NO: 49695 - DNA, 18 bp, synthetic construct
  misc_feature 1..18: note = Probe
  source 1..18: mol_type = other DNA
gtcaggatggccgagtgg

SEQ ID NO: 49696 - DNA, 20 bp, synthetic construct
  misc_feature 1..20: note = Probe
  source 1..20: mol_type = other DNA
gtcaggatggccgagtggtc

SEQ ID NO: 49697 - DNA, 21 bp, synthetic construct
  misc_feature 1..21: note = Probe
  source 1..21: mol_type = other DNA
gtcaggatggccgagtggtct

SEQ ID NO: 49698 - DNA, 22 bp, synthetic construct
  misc_feature 1..22: note = Probe
  source 1..22: mol_type = other DNA
gtcaggatggccgagtggtcta

SEQ ID NO: 49699 - DNA, 26 bp, synthetic construct
  misc_feature 1..26: note = Probe
  source 1..26: mol_type = other DNA
gtcaggatggccgagtggtctaaggc

SEQ ID NO: 49700 - DNA, 34 bp, synthetic construct; identical to SEQ ID NO: 22602
  misc_feature 1..34: note = Probe
  source 1..34: mol_type = other DNA

SEQ ID NO: 49701 - DNA, 35 bp, synthetic construct; identical to SEQ ID NO: 22603
  misc_feature 1..35: note = Probe
  source 1..35: mol_type = other DNA

SEQ ID NO: 49702 - DNA, 22 bp, synthetic construct
  misc_feature 1..22: note = Probe
  source 1..22: mol_type = other DNA
gtcatgggtggttgcgttttgg

SEQ ID NO: 49703 - DNA, 28 bp, synthetic construct
  misc_feature 1..28: note = Probe
  source 1..28: mol_type = other DNA
gtccagggttcaagtccctgttcgggcg

SEQ ID NO: 49704 - DNA, 30 bp, synthetic construct; identical to SEQ ID NO: 22618
  misc_feature 1..30: note = Probe
  source 1..30: mol_type = other DNA

SEQ ID NO: 49705 - DNA, 31 bp, synthetic construct; identical to SEQ ID NO: 7002
  misc_feature 1..31: note = Probe
  source 1..31: mol_type = other DNA

SEQ ID NO: 49706 - DNA, 31 bp, synthetic construct; identical to SEQ ID NO: 22620
  misc_feature 1..31: note = Probe
  source 1..31: mol_type = other DNA

SEQ ID NO: 49707 - DNA, 32 bp, synthetic construct
  misc_feature 1..32: note = Probe
  source 1..32: mol_type = other DNA
gtcccgggttcgatccccagcatctccagtgt

SEQ ID NO: 49708 - DNA, 33 bp, synthetic construct; identical to SEQ ID NO: 22621
  misc_feature 1..33: note = Probe
  source 1..33: mol_type = other DNA

SEQ ID NO: 49709 - DNA, 34 bp, synthetic construct; identical to SEQ ID NO: 22622
  misc_feature 1..34: note = Probe
  source 1..34: mol_type = other DNA

SEQ ID NO: 49710 - DNA, 35 bp, synthetic construct; identical to SEQ ID NO: 22623
  misc_feature 1..35: note = Probe
  source 1..35: mol_type = other DNA

SEQ ID NO: 49711 - DNA, 36 bp, synthetic construct; identical to SEQ ID NO: 22624
  misc_feature 1..36: note = Probe
  source 1..36: mol_type = other DNA

SEQ ID NO: 49712 - DNA, 29 bp, synthetic construct
  misc_feature 1..29: note = Probe
  source 1..29: mol_type = other DNA
gtccgcgtgggttcgaaccccactcctgg

SEQ ID NO: 49713 - DNA, 20 bp, synthetic construct
  misc_feature 1..20: note = Probe
  source 1..20: mol_type = other DNA
gtcctagcctttctattagc

SEQ ID NO: 49714 - DNA, 31 bp, synthetic construct
  misc_feature 1..31: note = Probe
  source 1..31: mol_type = other DNA
gtcctgagttcgaacctcagagggggcagct

SEQ ID NO: 49715 - DNA, 26 bp, synthetic construct
  misc_feature 1..26: note = Probe
  source 1..26: mol_type = other DNA
gtccttggaaaaaggttttcatctcc

SEQ ID NO: 49716 - DNA, 27 bp, synthetic construct
  misc_feature 1..27: note = Probe
  source 1..27: mol_type = other DNA
gtccttggaaaaaggttttcatctccg

SEQ ID NO: 49717 - DNA, 17 bp, synthetic construct
  misc_feature 1..17: note = Probe
  source 1..17: mol_type = other DNA
gtccttgtagtataaac

SEQ ID NO: 49718 - DNA, 19 bp, synthetic construct
  misc_feature 1..19: note = Probe
  source 1..19: mol_type = other DNA
gtccttgtagtataaacta

SEQ ID NO: 49719 - DNA, 22 bp, synthetic construct
  misc_feature 1..22: note = Probe
  source 1..22: mol_type = other DNA
gtccttgtagtataaactaata

SEQ ID NO: 49720 - DNA, 23 bp, synthetic construct
  misc_feature 1..23: note = Probe
  source 1..23: mol_type = other DNA
gtccttgtagtataaactaatac

SEQ ID NO: 49721 - DNA, 24 bp, synthetic construct
  misc_feature 1..24: note = Probe
  source 1..24: mol_type = other DNA
gtccttgtagtataaactaataca

SEQ ID NO: 49722 - DNA, 25 bp, synthetic construct
  misc_feature 1..25: note = Probe
  source 1..25: mol_type = other DNA
gtccttgtagtataaactaatacac

SEQ ID NO: 49723 - DNA, 32 bp, synthetic construct; identical to SEQ ID NO: 7010
  misc_feature 1..32: note = Probe
  source 1..32: mol_type = other DNA

SEQ ID NO: 49724 - DNA, 33 bp, synthetic construct; identical to SEQ ID NO: 7011
  misc_feature 1..33: note = Probe
  source 1..33: mol_type = other DNA

SEQ ID NO: 49725 - DNA, 34 bp, synthetic construct; identical to SEQ ID NO: 7012
  misc_feature 1..34: note = Probe
  source 1..34: mol_type = other DNA

SEQ ID NO: 49726 - DNA, 39 bp, synthetic construct; identical to SEQ ID NO: 7014
  misc_feature 1..39: note = Probe
  source 1..39: mol_type = other DNA

SEQ ID NO: 49727 - DNA, 31 bp, synthetic construct; identical to SEQ ID NO: 7016
  misc_feature 1..31: note = Probe
  source 1..31: mol_type = other DNA

SEQ ID NO: 49728 - DNA, 31 bp, synthetic construct; identical to SEQ ID NO: 7017
  misc_feature 1..31: note = Probe
  source 1..31: mol_type = other DNA

SEQ ID NO: 49729 - DNA, 31 bp, synthetic construct; identical to SEQ ID NO: 22662
  misc_feature 1..31: note = Probe
  source 1..31: mol_type = other DNA

SEQ ID NO: 49730 - DNA, 16 bp, synthetic construct
  misc_feature 1..16: note = Probe
  source 1..16: mol_type = other DNA
gtcggtagagcatgag

SEQ ID NO: 49731 - DNA, 17 bp, synthetic construct
  misc_feature 1..17: note = Probe
  source 1..17: mol_type = other DNA
gtcggtagagcatgaga

SEQ ID NO: 49732 - DNA, 18 bp, synthetic construct
  misc_feature 1..18: note = Probe
  source 1..18: mol_type = other DNA
gtcggtagagcatgagac

SEQ ID NO: 49733 - DNA, 16 bp, synthetic construct
  misc_feature 1..16: note = Probe
  source 1..16: mol_type = other DNA
gtcgtggttgtagtcc

SEQ ID NO: 49734 - DNA, 18 bp, synthetic construct
  misc_feature 1..18: note = Probe
  source 1..18: mol_type = other DNA
gtcgtggttgtagtccgt

SEQ ID NO: 49735 - DNA, 26 bp, synthetic construct
  misc_feature 1..26: note = Probe
  source 1..26: mol_type = other DNA
gtcgtggttgtagtccgtgcgagaat

SEQ ID NO: 49736 - DNA, 27 bp, synthetic construct
  misc_feature 1..27: note = Probe
  source 1..27: mol_type = other DNA
gtcgtggttgtagtccgtgcgagaata

SEQ ID NO: 49737 - DNA, 28 bp, synthetic construct
  misc_feature 1..28: note = Probe
  source 1..28: mol_type = other DNA
gtcgtggttgtagtccgtgcgagaataa

SEQ ID NO: 49738 - DNA, 29 bp, synthetic construct
  misc_feature 1..29: note = Probe
  source 1..29: mol_type = other DNA
gtcgtggttgtagtccgtgcgagaataat

SEQ ID NO: 49739 - DNA, 30 bp, synthetic construct; identical to SEQ ID NO: 7024
  misc_feature 1..30: note = Probe
  source 1..30: mol_type = other DNA

SEQ ID NO: 49740 - DNA, 24 bp, synthetic construct
  misc_feature 1..24: note = Probe
  source 1..24: mol_type = other DNA
gtctaacaacatggctttctcaac

SEQ ID NO: 49741 - DNA, 25 bp, synthetic construct
  misc_feature 1..25: note = Probe
  source 1..25: mol_type = other DNA
gtctaacaacatggctttctcaact

SEQ ID NO: 49742 - DNA, 24 bp, synthetic construct
  misc_feature 1..24: note = Probe
  source 1..24: mol_type = other DNA
gtctagtggttaggattcggcgct

SEQ ID NO: 49743 - DNA, 27 bp, synthetic construct
  misc_feature 1..27: note = Probe
  source 1..27: mol_type = other DNA
gtctagtggttaggattcggcgctctc

SEQ ID NO: 49744 - DNA, 22 bp, synthetic construct
  misc_feature 1..22: note = Probe
  source 1..22: mol_type = other DNA
gtctcataatctgaaggtcgtg

SEQ ID NO: 49745 - DNA, 50 bp, synthetic construct; identical to SEQ ID NO: 41231
  misc_feature 1..50: note = Probe
  source 1..50: mol_type = other DNA

SEQ ID NO: 49746 - DNA, 22 bp, synthetic construct
  misc_feature 1..22: note = Probe
  source 1..22: mol_type = other DNA
gtctgcaccaggatggccgagt

SEQ ID NO: 49747 - DNA, 32 bp, synthetic construct
  misc_feature 1..32: note = Probe
  source 1..32: mol_type = other DNA
gtcttaggccccaaaaattttggtgcaactcc

SEQ ID NO: 49748 - DNA, 33 bp, synthetic construct
  misc_feature 1..33: note = Probe
  source 1..33: mol_type = other DNA
gtcttaggccccaaaaattttggtgcaactcca

SEQ ID NO: 49749 - DNA, 37 bp, synthetic construct
  misc_feature 1..37: note = Probe
  source 1..37: mol_type = other DNA
gtcttaggccccaaaaattttggtgcaactccaaata

SEQ ID NO: 49750 - DNA, 46 bp, synthetic construct
  misc_feature 1..46: note = Probe
  source 1..46: mol_type = other DNA
gtcttaggccccaaaaattttggtgcaactccaaataaaagtaata

SEQ ID NO: 49751 - DNA, 42 bp, synthetic construct; identical to SEQ ID NO: 7041
  misc_feature 1..42: note = Probe
  source 1..42: mol_type = other DNA

SEQ ID NO: 49752 - DNA, 17 bp, synthetic construct
  misc_feature 1..17: note = Probe
  source 1..17: mol_type = other DNA
gtgaagcattggactgt

SEQ ID NO: 49753 - DNA, 39 bp, synthetic construct; identical to SEQ ID NO: 1502
  misc_feature 1..39: note = Probe
  source 1..39: mol_type = other DNA

SEQ ID NO: 49754 - DNA, 40 bp, synthetic construct; identical to SEQ ID NO: 7046
  misc_feature 1..40: note = Probe
  source 1..40: mol_type = other DNA

SEQ ID NO: 49755 - DNA, 41 bp, synthetic construct; identical to SEQ ID NO: 7047
  misc_feature 1..41: note = Probe
  source 1..41: mol_type = other DNA

SEQ ID NO: 49756 - DNA, 42 bp, synthetic construct; identical to SEQ ID NO: 7048
  misc_feature 1..42: note = Probe
  source 1..42: mol_type = other DNA

SEQ ID NO: 49757 - DNA, 40 bp, synthetic construct; identical to SEQ ID NO: 22728
  misc_feature 1..40: note = Probe
  source 1..40: mol_type = other DNA

SEQ ID NO: 49758 - DNA, 19 bp, synthetic construct
  misc_feature 1..19: note = Probe
  source 1..19: mol_type = other DNA
gtgagtatccccgcctgtc

SEQ ID NO: 49759 - DNA, 20 bp, synthetic construct
  misc_feature 1..20: note = Probe
  source 1..20: mol_type = other DNA
gtgagtatccccgcctgtca

SEQ ID NO: 49760 - DNA, 22 bp, synthetic construct
  misc_feature 1..22: note = Probe
  source 1..22: mol_type = other DNA
gtgagtatccccgcctgtcacg

SEQ ID NO: 49761 - DNA, 29 bp, synthetic construct
  misc_feature 1..29: note = Probe
  source 1..29: mol_type = other DNA
gtgatcgtatagtggttagtactctgcgt

SEQ ID NO: 49762 - DNA, 31 bp, synthetic construct; identical to SEQ ID NO: 1506
  misc_feature 1..31: note = Probe
  source 1..31: mol_type = other DNA

SEQ ID NO: 49763 - DNA, 32 bp, synthetic construct; identical to SEQ ID NO: 1507
  misc_feature 1..32: note = Probe
  source 1..32: mol_type = other DNA

SEQ ID NO: 49764 - DNA, 22 bp, synthetic construct
  misc_feature 1..22: note = Probe
  source 1..22: mol_type = other DNA
gtgattttcatattgaattgca

SEQ ID NO: 49765 - DNA, 21 bp, synthetic construct
  misc_feature 1..21: note = Probe
  source 1..21: mol_type = other DNA
gtgcaactccaaataaaagta

SEQ ID NO: 49766 - DNA, 17 bp, synthetic construct
  misc_feature 1..17: note = Probe
  source 1..17: mol_type = other DNA
gtgcacttggacgaacc

SEQ ID NO: 49767 - DNA, 50 bp, synthetic construct
  misc_feature 1..50: note = Probe
  source 1..50: mol_type = other DNA
gtgctaataacgccaaggtcgcgggttcgatccccgtacgggccactgga

SEQ ID NO: 49768 - DNA, 50 bp, synthetic construct
  misc_feature 1..50: note = Probe
  source 1..50: mol_type = other DNA
gtgctaataacgccaaggtcgcgggttcgatccccgtactggccacgtat

SEQ ID NO: 49769 - DNA, 50 bp, synthetic construct
  misc_feature 1..50: note = Probe
  source 1..50: mol_type = other DNA
gtgctgggcccataacccagaggtcgatggatcgaaaccatcctctgcta

SEQ ID NO: 49770 - DNA, 50 bp, synthetic construct; identical to SEQ ID NO: 41263
  misc_feature 1..50: note = Probe
  source 1..50: mol_type = other DNA

SEQ ID NO: 49771 - DNA, 27 bp, synthetic construct
  misc_feature 1..27: note = Probe
  source 1..27: mol_type = other DNA
gtggagttaaagactttttctctgatt

SEQ ID NO: 49772 - DNA, 28 bp, synthetic construct
  misc_feature 1..28: note = Probe
  source 1..28: mol_type = other DNA
gtggagttaaagactttttctctgattt

SEQ ID NO: 49773 - DNA, 32 bp, synthetic construct
  misc_feature 1..32: note = Probe
  source 1..32: mol_type = other DNA
gtggcacggagaattttggattctcagggatg

SEQ ID NO: 49774 - DNA, 30 bp, synthetic construct; identical to SEQ ID NO: 22788
  misc_feature 1..30: note = Probe
  source 1..30: mol_type = other DNA

SEQ ID NO: 49775 - DNA, 33 bp, synthetic construct; identical to SEQ ID NO: 7064
  misc_feature 1..33: note = Probe
  source 1..33: mol_type = other DNA

SEQ ID NO: 49776 - DNA, 18 bp, synthetic construct
  misc_feature 1..18: note = Probe
  source 1..18: mol_type = other DNA
gtggcgtcccggtagctc

SEQ ID NO: 49777 - DNA, 30 bp, synthetic construct; identical to SEQ ID NO: 22800
  misc_feature 1..30: note = Probe
  source 1..30: mol_type = other DNA

SEQ ID NO: 49778 - DNA, 23 bp, synthetic construct
  misc_feature 1..23: note = Probe
  source 1..23: mol_type = other DNA
gtggggttttgcagtccttagct

SEQ ID NO: 49779 - DNA, 17 bp, synthetic construct
  misc_feature 1..17: note = Probe
  source 1..17: mol_type = other DNA
gtggtagaattctcgcc

SEQ ID NO: 49780 - DNA, 18 bp, synthetic construct
  misc_feature 1..18: note = Probe
  source 1..18: mol_type = other DNA
gtggtagaattctcgcct

SEQ ID NO: 49781 - DNA, 16 bp, synthetic construct
  misc_feature 1..16: note = Probe
  source 1..16: mol_type = other DNA
gtggtagagcgcgtgc

SEQ ID NO: 49782 - DNA, 26 bp, synthetic construct
  misc_feature 1..26: note = Probe
  source 1..26: mol_type = other DNA
gtggtctagtggttaggattcggcgc

SEQ ID NO: 49783 - DNA, 16 bp, synthetic construct
  misc_feature 1..16: note = Probe
  source 1..16: mol_type = other DNA
gtggtgagtatccccg

SEQ ID NO: 49784 - DNA, 17 bp, synthetic construct
  misc_feature 1..17: note = Probe
  source 1..17: mol_type = other DNA
gtggtgagtatccccgc

SEQ ID NO: 49785 - DNA, 35 bp, synthetic construct; identical to SEQ ID NO: 22844
  misc_feature 1..35: note = Probe
  source 1..35: mol_type = other DNA

SEQ ID NO: 49786 - DNA, 35 bp, synthetic construct; identical to SEQ ID NO: 14107
  misc_feature 1..35: note = Probe
  source 1..35: mol_type = other DNA

SEQ ID NO: 49787 - DNA, 17 bp, synthetic construct
  misc_feature 1..17: note = Probe
  source 1..17: mol_type = other DNA
gtggttagtactctgcg

SEQ ID NO: 49788 - DNA, 18 bp, synthetic construct
  misc_feature 1..18: note = Probe
  source 1..18: mol_type = other DNA
gtggttagtactctgcgt

SEQ ID NO: 49789 - DNA, 19 bp, synthetic construct
  misc_feature 1..19: note = Probe
  source 1..19: mol_type = other DNA
gtggttagtactctgcgtt

SEQ ID NO: 49790 - DNA, 20 bp, synthetic construct
  misc_feature 1..20: note = Probe
  source 1..20: mol_type = other DNA
gtggttagtactctgcgttg

SEQ ID NO: 49791 - DNA, 25 bp, synthetic construct
  misc_feature 1..25: note = Probe
  source 1..25: mol_type = other DNA
gtggttcagtggtagaattctcgcc

SEQ ID NO: 49792 - DNA, 22 bp, synthetic construct
  misc_feature 1..22: note = Probe
  source 1..22: mol_type = other DNA
gtggttcgagcccacccaggga

SEQ ID NO: 49793 - DNA, 16 bp, synthetic construct
  misc_feature 1..16: note = Probe
  source 1..16: mol_type = other DNA
gtggttgtagtccgtg

SEQ ID NO: 49794 - DNA, 19 bp, synthetic construct
  misc_feature 1..19: note = Probe
  source 1..19: mol_type = other DNA
gtggttgtagtccgtgcga

SEQ ID NO: 49795 - DNA, 23 bp, synthetic construct
  misc_feature 1..23: note = Probe
  source 1..23: mol_type = other DNA
gtggttgtagtccgtgcgagaat

SEQ ID NO: 49796 - DNA, 24 bp, synthetic construct
  misc_feature 1..24: note = Probe
  source 1..24: mol_type = other DNA
gtggttgtagtccgtgcgagaata

SEQ ID NO: 49797 - DNA, 25 bp, synthetic construct
  misc_feature 1..25: note = Probe
  source 1..25: mol_type = other DNA
gtggttgtagtccgtgcgagaataa

SEQ ID NO: 49798 - DNA, 27 bp, synthetic construct
  misc_feature 1..27: note = Probe
  source 1..27: mol_type = other DNA
gtggttgtagtccgtgcgagaataatg

SEQ ID NO: 49799 - DNA, 19 bp, synthetic construct
  misc_feature 1..19: note = Probe
  source 1..19: mol_type = other DNA
gtgtagtggttatcacgtt

SEQ ID NO: 49800 - DNA, 16 bp, synthetic construct
  misc_feature 1..16: note = Probe
  source 1..16: mol_type = other DNA
gtgtccctagtagctc

SEQ ID NO: 49801 - DNA, 20 bp, synthetic construct
  misc_feature 1..20: note = Probe
  source 1..20: mol_type = other DNA
gtgtgaatccttcgatagct

SEQ ID NO: 49802 - DNA, 22 bp, synthetic construct
  misc_feature 1..22: note = Probe
  source 1..22: mol_type = other DNA
gtgtgaatccttcgatagctca

SEQ ID NO: 49803 - DNA, 20 bp, synthetic construct
  misc_feature 1..20: note = Probe
  source 1..20: mol_type = other DNA
gtgtgataggtggcacggag

SEQ ID NO: 49804 - DNA, 21 bp, synthetic construct
  misc_feature 1..21: note = Probe
  source 1..21: mol_type = other DNA
gtgtgataggtggcacggaga

SEQ ID NO: 49805 - DNA, 19 bp, synthetic construct
  misc_feature 1..19: note = Probe
  source 1..19: mol_type = other DNA
gtgtgtcaggatggccgag

SEQ ID NO: 49806 - DNA, 26 bp, synthetic construct
  misc_feature 1..26: note = Probe
  source 1..26: mol_type = other DNA
gtgttcgaatcacgtcggggtcaaac

SEQ ID NO: 49807 - DNA, 36 bp, synthetic construct; identical to SEQ ID NO: 22916
  misc_feature 1..36: note = Probe
  source 1..36: mol_type = other DNA

SEQ ID NO: 49808 - DNA, 24 bp, synthetic construct
  misc_feature 1..24: note = Probe
  source 1..24: mol_type = other DNA
gtgtttgtgggtttaagtcccatt

SEQ ID NO: 49809 - DNA, 26 bp, synthetic construct
  misc_feature 1..26: note = Probe
  source 1..26: mol_type = other DNA
gtgtttgtgggtttaagtcccattgg

SEQ ID NO: 49810 - DNA, 27 bp, synthetic construct
  misc_feature 1..27: note = Probe
  source 1..27: mol_type = other DNA
gtgtttgtgggtttaagtcccattggt

SEQ ID NO: 49811 - DNA, 31 bp, synthetic construct; identical to SEQ ID NO: 22919
  misc_feature 1..31: note = Probe
  source 1..31: mol_type = other DNA

SEQ ID NO: 49812 - DNA, 32 bp, synthetic construct; identical to SEQ ID NO: 7107
  misc_feature 1..32: note = Probe
  source 1..32: mol_type = other DNA

SEQ ID NO: 49813 - DNA, 33 bp, synthetic construct; identical to SEQ ID NO: 7108
  misc_feature 1..33: note = Probe
  source 1..33: mol_type = other DNA

SEQ ID NO: 49814 - DNA, 21 bp, synthetic construct
  misc_feature 1..21: note = Probe
  source 1..21: mol_type = other DNA
gttaaagactttttctctgat

SEQ ID NO: 49815 - DNA, 22 bp, synthetic construct
  misc_feature 1..22: note = Probe
  source 1..22: mol_type = other DNA
gttaaagactttttctctgatt

SEQ ID NO: 49816 - DNA, 19 bp, synthetic construct
  misc_feature 1..19: note = Probe
  source 1..19: mol_type = other DNA
gttaaagattaagagaacc

SEQ ID NO: 49817 - DNA, 25 bp, synthetic construct
  misc_feature 1..25: note = Probe
  source 1..25: mol_type = other DNA
gttaaagattaagagaaccaacacc

SEQ ID NO: 49818 - DNA, 35 bp, synthetic construct; identical to SEQ ID NO: 22925
  misc_feature 1..35: note = Probe
  source 1..35: mol_type = other DNA

SEQ ID NO: 49819 - DNA, 36 bp, synthetic construct; identical to SEQ ID NO: 7116
  misc_feature 1..36: note = Probe
  source 1..36: mol_type = other DNA

SEQ ID NO: 49820 - DNA, 37 bp, synthetic construct; identical to SEQ ID NO: 7117
  misc_feature 1..37: note = Probe
  source 1..37: mol_type = other DNA

SEQ ID NO: 49821 - DNA, 38 bp, synthetic construct; identical to SEQ ID NO: 7118
  misc_feature 1..38: note = Probe
  source 1..38: mol_type = other DNA

SEQ ID NO: 49822 - DNA, 39 bp, synthetic construct; identical to SEQ ID NO: 7119
  misc_feature 1..39: note = Probe
  source 1..39: mol_type = other DNA

SEQ ID NO: 49823 - DNA, 40 bp, synthetic construct; identical to SEQ ID NO: 7120
  misc_feature 1..40: note = Probe
  source 1..40: mol_type = other DNA

SEQ ID NO: 49824 - DNA, 41 bp, synthetic construct; identical to SEQ ID NO: 7121
  misc_feature 1..41: note = Probe
  source 1..41: mol_type = other DNA

SEQ ID NO: 49825 - DNA, 42 bp, synthetic construct; identical to SEQ ID NO: 7122
  misc_feature 1..42: note = Probe
  source 1..42: mol_type = other DNA

SEQ ID NO: 49826 - DNA, 46 bp, synthetic construct; identical to SEQ ID NO: 7124
  misc_feature 1..46: note = Probe
  source 1..46: mol_type = other DNA

SEQ ID NO: 49827 - DNA, 38 bp, synthetic construct; identical to SEQ ID NO: 22935
  misc_feature 1..38: note = Probe
  source 1..38: mol_type = other DNA

SEQ ID NO: 49828 - DNA, 23 bp, synthetic construct
  misc_feature 1..23: note = Probe
  source 1..23: mol_type = other DNA
gttaactaagtgtttgtgggttt

SEQ ID NO: 49829 - DNA, 24 bp, synthetic construct
  misc_feature 1..24: note = Probe
  source 1..24: mol_type = other DNA
gttaactaagtgtttgtgggttta

SEQ ID NO: 49830 - DNA, 28 bp, synthetic construct
  misc_feature 1..28: note = Probe
  source 1..28: mol_type = other DNA
gttaactaagtgtttgtgggtttaagtc

SEQ ID NO: 49831 - DNA, 33 bp, synthetic construct; identical to SEQ ID NO: 22937
  misc_feature 1..33: note = Probe
  source 1..33: mol_type = other DNA

SEQ ID NO: 49832 - DNA, 35 bp, synthetic construct
  misc_feature 1..35: note = Probe
  source 1..35: mol_type = other DNA
gttaactaagtgtttgtgggtttaagtcccattgg

SEQ ID NO: 49833 - DNA, 39 bp, synthetic construct
  misc_feature 1..39: note = Probe
  source 1..39: mol_type = other DNA
gttaactaagtgtttgtgggtttaagtcccattggtcta

SEQ ID NO: 49834 - DNA, 41 bp, synthetic construct; identical to SEQ ID NO: 7128
  misc_feature 1..41: note = Probe
  source 1..41: mol_type = other DNA

SEQ ID NO: 49835 - DNA, 42 bp, synthetic construct; identical to SEQ ID NO: 22941
  misc_feature 1..42: note = Probe
  source 1..42: mol_type = other DNA

SEQ ID NO: 49836 - DNA, 43 bp, synthetic construct; identical to SEQ ID NO: 7129
  misc_feature 1..43: note = Probe
  source 1..43: mol_type = other DNA

SEQ ID NO: 49837 - DNA, 22 bp, synthetic construct
  misc_feature 1..22: note = Probe
  source 1..22: mol_type = other DNA
gttaagatggcagagcccggta

SEQ ID NO: 49838 - DNA, 26 bp, synthetic construct
  misc_feature 1..26: note = Probe
  source 1..26: mol_type = other DNA
gttaagatggcagagcccggtaatcg

SEQ ID NO: 49839 - DNA, 27 bp, synthetic construct
  misc_feature 1..27: note = Probe
  source 1..27: mol_type = other DNA
gttaagatggcagagcccggtaatcgc

SEQ ID NO: 49840 - DNA, 30 bp, synthetic construct; identical to SEQ ID NO: 1521
  misc_feature 1..30: note = Probe
  source 1..30: mol_type = other DNA

SEQ ID NO: 49841 - DNA, 31 bp, synthetic construct; identical to SEQ ID NO: 22952
  misc_feature 1..31: note = Probe
  source 1..31: mol_type = other DNA

SEQ ID NO: 49842 - DNA, 42 bp, synthetic construct; identical to SEQ ID NO: 1524
  misc_feature 1..42: note = Probe
  source 1..42: mol_type = other DNA

SEQ ID NO: 49843 - DNA, 43 bp, synthetic construct; identical to SEQ ID NO: 7143
  misc_feature 1..43: note = Probe
  source 1..43: mol_type = other DNA

SEQ ID NO: 49844 - DNA, 50 bp, synthetic construct; identical to SEQ ID NO: 7145
  misc_feature 1..50: note = Probe
  source 1..50: mol_type = other DNA

SEQ ID NO: 49845 - DNA, 32 bp, synthetic construct; identical to SEQ ID NO: 14122
  misc_feature 1..32: note = Probe
  source 1..32: mol_type = other DNA

SEQ ID NO: 49846 - DNA, 21 bp, synthetic construct
  misc_feature 1..21: note = Probe
  source 1..21: mol_type = other DNA
gttaggcctctttttaccagc

SEQ ID NO: 49847 - DNA, 20 bp, synthetic construct
  misc_feature 1..20: note = Probe
  source 1..20: mol_type = other DNA
gttatacccttcccgtacta

SEQ ID NO: 49848 - DNA, 28 bp, synthetic construct
  misc_feature 1..28: note = Probe
  source 1..28: mol_type = other DNA
gttatgaaatggtttttctaataccttt

SEQ ID NO: 49849 - DNA, 31 bp, synthetic construct; identical to SEQ ID NO: 7152
  misc_feature 1..31: note = Probe
  source 1..31: mol_type = other DNA

SEQ ID NO: 49850 - DNA, 24 bp, synthetic construct
  misc_feature 1..24: note = Probe
  source 1..24: mol_type = other DNA
gttcaaatcacgtcggggtcaaca

SEQ ID NO: 49851 - DNA, 24 bp, synthetic construct
  misc_feature 1..24: note = Probe
  source 1..24: mol_type = other DNA
gttcaaatcccggacgagccccct

SEQ ID NO: 49852 - DNA, 24 bp, synthetic construct
  misc_feature 1..24: note = Probe
  source 1..24: mol_type = other DNA
gttcaaatccgggtgccccctcaa

SEQ ID NO: 49853 - DNA, 21 bp, synthetic construct
  misc_feature 1..21: note = Probe
  source 1..21: mol_type = other DNA
gttcaaatctcggtggaacct

SEQ ID NO: 49854 - DNA, 21 bp, synthetic construct
  misc_feature 1..21: note = Probe
  source 1..21: mol_type = other DNA
gttcaaatctcggtgggacct

SEQ ID NO: 49855 - DNA, 24 bp, synthetic construct
  misc_feature 1..24: note = Probe
  source 1..24: mol_type = other DNA
gttcaagtccctgttcgggcggca

SEQ ID NO: 49856 - DNA, 21 bp, synthetic construct
  misc_feature 1..21: note = Probe
  source 1..21: mol_type = other DNA
gttcaatccccggcacctcca

SEQ ID NO: 49857 - DNA, 24 bp, synthetic construct
  misc_feature 1..24: note = Probe
  source 1..24: mol_type = other DNA
gttcaattccccgacggggaggtg

SEQ ID NO: 49858 - DNA, 24 bp, synthetic construct
  misc_feature 1..24: note = Probe
  source 1..24: mol_type = other DNA
gttcaattcccggtcagggaacca

SEQ ID NO: 49859 - DNA, 24 bp, synthetic construct
  misc_feature 1..24: note = Probe
  source 1..24: mol_type = other DNA
gttcagtggtagaattctcgcctg

SEQ ID NO: 49860 - DNA, 39 bp, synthetic construct
  misc_feature 1..39: note = Probe
  source 1..39: mol_type = other DNA
gttcagttgatgcagagtggggttttgcagtccttagct

SEQ ID NO: 49861 - DNA, 24 bp, synthetic construct
  misc_feature 1..24: note = Probe
  source 1..24: mol_type = other DNA
gttcgaaaccgggcggaaacacct

SEQ ID NO: 49862 - DNA, 24 bp, synthetic construct
  misc_feature 1..24: note = Probe
  source 1..24: mol_type = other DNA
gttcgaacctcagagggggcagct

SEQ ID NO: 49863 - DNA, 21 bp, synthetic construct
  misc_feature 1..21: note = Probe
  source 1..21: mol_type = other DNA
gttcgaatcccaccgctgcca

SEQ ID NO: 49864 - DNA, 22 bp, synthetic construct
  misc_feature 1..22: note = Probe
  source 1..22: mol_type = other DNA
gttcgaatcccaccgctgccac

SEQ ID NO: 49865 - DNA, 23 bp, synthetic construct
  misc_feature 1..23: note = Probe
  source 1..23: mol_type = other DNA
gttcgaatcccaccgctgccaca

SEQ ID NO: 49866 - DNA, 24 bp, synthetic construct
  misc_feature 1..24: note = Probe
  source 1..24: mol_type = other DNA
gttcgaatcccaccgctgccacac

SEQ ID NO: 49867 - DNA, 24 bp, synthetic construct
  misc_feature 1..24: note = Probe
  source 1..24: mol_type = other DNA
gttcgaatcccaccgctgccaggt

SEQ ID NO: 49868 - DNA, 21 bp, synthetic construct
  misc_feature 1..21: note = Probe
  source 1..21: mol_type = other DNA
gttcgaatcccacttctgaca

SEQ ID NO: 49869 - DNA, 24 bp, synthetic construct
  misc_feature 1..24: note = Probe
  source 1..24: mol_type = other DNA
gttcgaatcccacttctgacacaa

SEQ ID NO: 49870 - DNA, 21 bp, synthetic construct
  misc_feature 1..21: note = Probe
  source 1..21: mol_type = other DNA
gttcgaatcccagcggtgcct

SEQ ID NO: 49871 - DNA, 22 bp, synthetic construct
  misc_feature 1..22: note = Probe
  source 1..22: mol_type = other DNA
gttcgaatcccagcggtgcctc

SEQ ID NO: 49872 - DNA, 24 bp, synthetic construct
  misc_feature 1..24: note = Probe
  source 1..24: mol_type = other DNA
gttcgaatcccagcggtgcctccg

SEQ ID NO: 49873 - DNA, 19 bp, synthetic construct
  misc_feature 1..19: note = Probe
  source 1..19: mol_type = other DNA
gttcgaatcccatcctcgt

SEQ ID NO: 49874 - DNA, 21 bp, synthetic construct
  misc_feature 1..21: note = Probe
  source 1..21: mol_type = other DNA
gttcgaatcccatcctcgtcg

SEQ ID NO: 49875 - DNA, 24 bp, synthetic construct
  misc_feature 1..24: note = Probe
  source 1..24: mol_type = other DNA
gttcgaatccgagtcacggcaggt

SEQ ID NO: 49876 - DNA, 24 bp, synthetic construct
  misc_feature 1..24: note = Probe
  source 1..24: mol_type = other DNA
gttcgaatccgagtcacggcattg

SEQ ID NO: 49877 - DNA, 21 bp, synthetic construct
  misc_feature 1..21: note = Probe
  source 1..21: mol_type = other DNA
gttcgaatccggctcgaagga

SEQ ID NO: 49878 - DNA, 24 bp, synthetic construct
  misc_feature 1..24: note = Probe
  source 1..24: mol_type = other DNA
gttcgaatccggctcgaaggacga

SEQ ID NO: 49879 - DNA, 22 bp, synthetic construct
  misc_feature 1..22: note = Probe
  source 1..22: mol_type = other DNA
gttcgaatcctgccgactacga

SEQ ID NO: 49880 - DNA, 22 bp, synthetic construct
  misc_feature 1..22: note = Probe
  source 1..22: mol_type = other DNA
gttcgaatcctgccgactacgg

SEQ ID NO: 49881 - DNA, 24 bp, synthetic construct
  misc_feature 1..24: note = Probe
  source 1..24: mol_type = other DNA
gttcgaatcctgccgactacggca

SEQ ID NO: 49882 - DNA, 22 bp, synthetic construct
  misc_feature 1..22: note = Probe
  source 1..22: mol_type = other DNA
gttcgaatcctgccgactacgt

SEQ ID NO: 49883 - DNA, 24 bp, synthetic construct
  misc_feature 1..24: note = Probe
  source 1..24: mol_type = other DNA
gttcgaatcctgccgactacgtca

SEQ ID NO: 49884 - DNA, 24 bp, synthetic construct
  misc_feature 1..24: note = Probe
  source 1..24: mol_type = other DNA
gttcgactcccggtatgggaacaa

SEQ ID NO: 49885 - DNA, 21 bp, synthetic construct
  misc_feature 1..21: note = Probe
  source 1..21: mol_type = other DNA
gttcgactcccggtgtgggaa

SEQ ID NO: 49886 - DNA, 24 bp, synthetic construct
  misc_feature 1..24: note = Probe
  source 1..24: mol_type = other DNA
gttcgactcccggtgtgggaacgc

SEQ ID NO: 49887 - DNA, 19 bp, synthetic construct
  misc_feature 1..19: note = Probe
  source 1..19: mol_type = other DNA
gttcgagcccacccaggga

SEQ ID NO: 49888 - DNA, 21 bp, synthetic construct
  misc_feature 1..21: note = Probe
  source 1..21: mol_type = other DNA
gttcgagcccacccagggacg

SEQ ID NO: 49889 - DNA, 22 bp, synthetic construct
  misc_feature 1..22: note = Probe
  source 1..22: mol_type = other DNA
gttcgagcccacccagggacgc

SEQ ID NO: 49890 - DNA, 23 bp, synthetic construct
  misc_feature 1..23: note = Probe
  source 1..23: mol_type = other DNA
gttcgagcccacccagggacgcc

SEQ ID NO: 49891 - DNA, 24 bp, synthetic construct
  misc_feature 1..24: note = Probe
  source 1..24: mol_type = other DNA
gttcgagcccacccagggacgcct

SEQ ID NO: 49892 - DNA, 24 bp, synthetic construct
  misc_feature 1..24: note = Probe
  source 1..24: mol_type = other DNA
gttcgagccccacgttgggcggca

SEQ ID NO: 49893 - DNA, 21 bp, synthetic construct
  misc_feature 1..21: note = Probe
  source 1..21: mol_type = other DNA
gttcgagccccagtggaacca

SEQ ID NO: 49894 - DNA, 24 bp, synthetic construct
  misc_feature 1..24: note = Probe
  source 1..24: mol_type = other DNA
gttcgagtcccacctggggtgtcg

SEQ ID NO: 49895 - DNA, 22 bp, synthetic construct
  misc_feature 1..22: note = Probe
  source 1..22: mol_type = other DNA
gttcgagtcccatctggggtgg

SEQ ID NO: 49896 - DNA, 23 bp, synthetic construct
  misc_feature 1..23: note = Probe
  source 1..23: mol_type = other DNA
gttcgagtcccatctggggtggc

SEQ ID NO: 49897 - DNA, 23 bp, synthetic construct
  misc_feature 1..23: note = Probe
  source 1..23: mol_type = other DNA
gttcgagtcccatctgggtcgcg

SEQ ID NO: 49898 - DNA, 24 bp, synthetic construct
  misc_feature 1..24: note = Probe
  source 1..24: mol_type = other DNA
gttcgagtcccatctgggtcgcgt

SEQ ID NO: 49899 - DNA, 21 bp, synthetic construct
  misc_feature 1..21: note = Probe
  source 1..21: mol_type = other DNA
gttcgagtcccttcgtggtcg

SEQ ID NO: 49900 - DNA, 22 bp, synthetic construct
  misc_feature 1..22: note = Probe
  source 1..22: mol_type = other DNA
gttcgagtcccttcgtggtcgg

SEQ ID NO: 49901 - DNA, 22 bp, synthetic construct
  misc_feature 1..22: note = Probe
  source 1..22: mol_type = other DNA
gttcgagtcccttcgtggtcgt

SEQ ID NO: 49902 - DNA, 23 bp, synthetic construct
  misc_feature 1..23: note = Probe
  source 1..23: mol_type = other DNA
gttcgagtcccttcgtggtcgtc

SEQ ID NO: 49903 - DNA, 24 bp, synthetic construct
  misc_feature 1..24: note = Probe
  source 1..24: mol_type = other DNA
gttcgagtcccttcgtggtcgttg

SEQ ID NO: 49904 - DNA, 24 bp, synthetic construct
  misc_feature 1..24: note = Probe
  source 1..24: mol_type = other DNA
gttcgagtcctgccgcggtcgaag

SEQ ID NO: 49905 - DNA, 24 bp, synthetic construct
  misc_feature 1..24: note = Probe
  source 1..24: mol_type = other DNA
gttcgatccccagcatctccagtg

SEQ ID NO: 49906 - DNA, 21 bp, synthetic construct
  misc_feature 1..21: note = Probe
  source 1..21: mol_type = other DNA
gttcgatccccggcatctcca

SEQ ID NO: 49907 - DNA, 23 bp, synthetic construct
  misc_feature 1..23: note = Probe
  source 1..23: mol_type = other DNA
gttcgatccccggcatctccatt

SEQ ID NO: 49908 - DNA, 24 bp, synthetic construct
  misc_feature 1..24: note = Probe
  source 1..24: mol_type = other DNA
gttcgatccccggcatctccattg

SEQ ID NO: 49909 - DNA, 23 bp, synthetic construct
  misc_feature 1..23: note = Probe
  source 1..23: mol_type = other DNA
gttcgatccccgtacgggccaca

SEQ ID NO: 49910 - DNA, 23 bp, synthetic construct
  misc_feature 1..23: note = Probe
  source 1..23: mol_type = other DNA
gttcgatccccgtacgggccacg

SEQ ID NO: 49911 - DNA, 24 bp, synthetic construct
  misc_feature 1..24: note = Probe
  source 1..24: mol_type = other DNA
gttcgatccccgtacgggccacga

SEQ ID NO: 49912 - DNA, 23 bp, synthetic construct
  misc_feature 1..23: note = Probe
  source 1..23: mol_type = other DNA
gttcgatccccgtacgggccact

SEQ ID NO: 49913 - DNA, 24 bp, synthetic construct
  misc_feature 1..24: note = Probe
  source 1..24: mol_type = other DNA
gttcgatccccgtacgggccactg

SEQ ID NO: 49914 - DNA, 22 bp, synthetic construct
  misc_feature 1..22: note = Probe
  source 1..22: mol_type = other DNA
gttcgatcccgggtttcggcac

SEQ ID NO: 49915 - DNA, 21 bp, synthetic construct
  misc_feature 1..21: note = Probe
  source 1..21: mol_type = other DNA
gttcgatcctcacacggggca

SEQ ID NO: 49916 - DNA, 23 bp, synthetic construct
  misc_feature 1..23: note = Probe
  source 1..23: mol_type = other DNA
gttcgatcctcacacggggcaca

SEQ ID NO: 49917 - DNA, 24 bp, synthetic construct
  misc_feature 1..24: note = Probe
  source 1..24: mol_type = other DNA
gttcgatcctcacacggggcacaa

SEQ ID NO: 49918 - DNA, 22 bp, synthetic construct
  misc_feature 1..22: note = Probe
  source 1..22: mol_type = other DNA
gttcgattccccgacggggaga

SEQ ID NO: 49919 - DNA, 23 bp, synthetic construct
  misc_feature 1..23: note = Probe
  source 1..23: mol_type = other DNA
gttcgattccccgacggggagac

SEQ ID NO: 49920 - DNA, 22 bp, synthetic construct
  misc_feature 1..22: note = Probe
  source 1..22: mol_type = other DNA
gttcgattccccgacggggagg

SEQ ID NO: 49921 - DNA, 23 bp, synthetic construct
  misc_feature 1..23: note = Probe
  source 1..23: mol_type = other DNA
gttcgattccccgacggggaggc

SEQ ID NO: 49922 - DNA, 24 bp, synthetic construct
  misc_feature 1..24: note = Probe
  source 1..24: mol_type = other DNA
gttcgattccccgacggggaggca

SEQ ID NO: 49923 - DNA, 21 bp, synthetic construct
  misc_feature 1..21: note = Probe
  source 1..21: mol_type = other DNA
gttcgattcccggccaacgca

SEQ ID NO: 49924 - DNA, 24 bp, synthetic construct
  misc_feature 1..24: note = Probe
  source 1..24: mol_type = other DNA
gttcgattcccggccaacgcaagt

SEQ ID NO: 49925 - DNA, 24 bp, synthetic construct
  misc_feature 1..24: note = Probe
  source 1..24: mol_type = other DNA
gttcgattcccggccaacgcagtg

SEQ ID NO: 49926 - DNA, 21 bp, synthetic construct
  misc_feature 1..21: note = Probe
  source 1..21: mol_type = other DNA
gttcgattcccggccaatgca

SEQ ID NO: 49927 - DNA, 24 bp, synthetic construct
  misc_feature 1..24: note = Probe
  source 1..24: mol_type = other DNA
gttcgattcccggccaatgcacga

SEQ ID NO: 49928 - DNA, 24 bp, synthetic construct
  misc_feature 1..24: note = Probe
  source 1..24: mol_type = other DNA
gttcgattcccggccaatgcagca

SEQ ID NO: 49929 - DNA, 24 bp, synthetic construct
  misc_feature 1..24: note = Probe
  source 1..24: mol_type = other DNA
gttcgattcccggtcagggaacaa

SEQ ID NO: 49930 - DNA, 24 bp, synthetic construct
  misc_feature 1..24: note = Probe
  source 1..24: mol_type = other DNA
gttcgattcccggtcatggaacca

SEQ ID NO: 49931 - DNA, 24 bp, synthetic construct
  misc_feature 1..24: note = Probe
  source 1..24: mol_type = other DNA
gttcgattcctggtcagggaacca

SEQ ID NO: 49932 - DNA, 23 bp, synthetic construct
  misc_feature 1..23: note = Probe
  source 1..23: mol_type = other DNA
gttcgattccttccttttttgtc

SEQ ID NO: 49933 - DNA, 23 bp, synthetic construct
  misc_feature 1..23: note = Probe
  source 1..23: mol_type = other DNA
gttcgattctcatagtcctagaa

SEQ ID NO: 49934 - DNA, 27 bp, synthetic construct
  misc_feature 1..27: note = Probe
  source 1..27: mol_type = other DNA
gttcttgtagttgaaatacaacgatgg

SEQ ID NO: 49935 - DNA, 28 bp, synthetic construct
  misc_feature 1..28: note = Probe
  source 1..28: mol_type = other DNA
gttcttgtagttgaaatacaacgatggt

SEQ ID NO: 49936 - DNA, 38 bp, synthetic construct; identical to SEQ ID NO: 7200
  misc_feature 1..38: note = Probe
  source 1..38: mol_type = other DNA

SEQ ID NO: 49937 - DNA, 46 bp, synthetic construct; identical to SEQ ID NO: 1528
  misc_feature 1..46: note = Probe
  source 1..46: mol_type = other DNA

SEQ ID NO: 49938 - DNA, 50 bp, synthetic construct; identical to SEQ ID NO: 1529
  misc_feature 1..50: note = Probe
  source 1..50: mol_type = other DNA

SEQ ID NO: 49939 - DNA, 50 bp, synthetic construct; identical to SEQ ID NO: 23018
  misc_feature 1..50: note = Probe
  source 1..50: mol_type = other DNA

SEQ ID NO: 49940 - DNA, 18 bp, synthetic construct
  misc_feature 1..18: note = Probe
  source 1..18: mol_type = other DNA
gttgatgcagagtggggt

SEQ ID NO: 49941 - DNA, 19 bp, synthetic construct
  misc_feature 1..19: note = Probe
  source 1..19: mol_type = other DNA
gttgatgcagagtggggtt

SEQ ID NO: 49942 - DNA, 23 bp, synthetic construct
  misc_feature 1..23: note = Probe
  source 1..23: mol_type = other DNA
gttgatgcagagtggggttttgc

SEQ ID NO: 49943 - DNA, 26 bp, synthetic construct
  misc_feature 1..26: note = Probe
  source 1..26: mol_type = other DNA
gttgatgcagagtggggttttgcagt

SEQ ID NO: 49944 - DNA, 28 bp, synthetic construct
  misc_feature 1..28: note = Probe
  source 1..28: mol_type = other DNA
gttgatgcagagtggggttttgcagtcc

SEQ ID NO: 49945 - DNA, 29 bp, synthetic construct
  misc_feature 1..29: note = Probe
  source 1..29: mol_type = other DNA
gttgatgcagagtggggttttgcagtcct

SEQ ID NO: 49946 - DNA, 33 bp, synthetic construct; identical to SEQ ID NO: 23021
  misc_feature 1..33: note = Probe
  source 1..33: mol_type = other DNA

SEQ ID NO: 49947 - DNA, 34 bp, synthetic construct; identical to SEQ ID NO: 7208
  misc_feature 1..34: note = Probe
  source 1..34: mol_type = other DNA

SEQ ID NO: 49948 - DNA, 28 bp, synthetic construct
  misc_feature 1..28: note = Probe
  source 1..28: mol_type = other DNA
gttgattagggtgcttagctgttaacta

SEQ ID NO: 49949 - DNA, 36 bp, synthetic construct; identical to SEQ ID NO: 25605
  misc_feature 1..36: note = Probe
  source 1..36: mol_type = other DNA

SEQ ID NO: 49950 - DNA, 38 bp, synthetic construct
  misc_feature 1..38: note = Probe
  source 1..38: mol_type = other DNA
gttgattagggtgcttagctgttaactaagtgtttgtg

SEQ ID NO: 49951 - DNA, 28 bp, synthetic construct
  misc_feature 1..28: note = Probe
  source 1..28: mol_type = other DNA
gttggtggttcgagcccacccagggacg

SEQ ID NO: 49952 - DNA, 21 bp, synthetic construct
  misc_feature 1..21: note = Probe
  source 1..21: mol_type = other DNA
gttggttatacccttcccgta

SEQ ID NO: 49953 - DNA, 27 bp, synthetic construct
  misc_feature 1..27: note = Probe
  source 1..27: mol_type = other DNA
gttggttatacccttcccgtactaatt

SEQ ID NO: 49954 - DNA, 17 bp, synthetic construct
  misc_feature 1..17: note = Probe
  source 1..17: mol_type = other DNA
gttgtagtccgtgcgag

SEQ ID NO: 49955 - DNA, 19 bp, synthetic construct
  misc_feature 1..19: note = Probe
  source 1..19: mol_type = other DNA
gttgtagtccgtgcgagaa

SEQ ID NO: 49956 - DNA, 21 bp, synthetic construct
  misc_feature 1..21: note = Probe
  source 1..21: mol_type = other DNA
gttgtagtccgtgcgagaata

SEQ ID NO: 49957 - DNA, 24 bp, synthetic construct
  misc_feature 1..24: note = Probe
  source 1..24: mol_type = other DNA
gttgtagtccgtgcgagaataatg

SEQ ID NO: 49958 - DNA, 50 bp, synthetic construct; identical to SEQ ID NO: 1530
  misc_feature 1..50: note = Probe
  source 1..50: mol_type = other DNA

SEQ ID NO: 49959 - DNA, 18 bp, synthetic construct
  misc_feature 1..18: note = Probe
  source 1..18: mol_type = other DNA
gtttaagtcccattggtc

SEQ ID NO: 49960 - DNA, 17 bp, synthetic construct
  misc_feature 1..17: note = Probe
  source 1..17: mol_type = other DNA
gtttagacgggctcaca

SEQ ID NO: 49961 - DNA, 18 bp, synthetic construct
  misc_feature 1..18: note = Probe
  source 1..18: mol_type = other DNA
gtttagacgggctcacat

SEQ ID NO: 49962 - DNA, 20 bp, synthetic construct
  misc_feature 1..20: note = Probe
  source 1..20: mol_type = other DNA
gtttagacgggctcacatca

SEQ ID NO: 49963 - DNA, 25 bp, synthetic construct
  misc_feature 1..25: note = Probe
  source 1..25: mol_type = other DNA
gtttagacgggctcacatcacccca

SEQ ID NO: 49964 - DNA, 26 bp, synthetic construct
  misc_feature 1..26: note = Probe
  source 1..26: mol_type = other DNA
gtttagacgggctcacatcaccccat

SEQ ID NO: 49965 - DNA, 27 bp, synthetic construct
  misc_feature 1..27: note = Probe
  source 1..27: mol_type = other DNA
gtttagacgggctcacatcaccccata

SEQ ID NO: 49966 - DNA, 28 bp, synthetic construct
  misc_feature 1..28: note = Probe
  source 1..28: mol_type = other DNA
gtttagacgggctcacatcaccccataa

SEQ ID NO: 49967 - DNA, 31 bp, synthetic construct; identical to SEQ ID NO: 7236
  misc_feature 1..31: note = Probe
  source 1..31: mol_type = other DNA

SEQ ID NO: 49968 - DNA, 32 bp, synthetic construct; identical to SEQ ID NO: 7237
  misc_feature 1..32: note = Probe
  source 1..32: mol_type = other DNA

SEQ ID NO: 49969 - DNA, 33 bp, synthetic construct; identical to SEQ ID NO: 7238
  misc_feature 1..33: note = Probe
  source 1..33: mol_type = other DNA

SEQ ID NO: 49970 - DNA, 34 bp, synthetic construct; identical to SEQ ID NO: 7239
  misc_feature 1..34: note = Probe
  source 1..34: mol_type = other DNA

SEQ ID NO: 49971 - DNA, 23 bp, synthetic construct
  misc_feature 1..23: note = Probe
  source 1..23: mol_type = other DNA
gtttatgtagcttacctcctcaa

SEQ ID NO: 49972 - DNA, 27 bp, synthetic construct
  misc_feature 1..27: note = Probe
  source 1..27: mol_type = other DNA
gtttatgtagcttacctcctcaaagca

SEQ ID NO: 49973 - DNA, 31 bp, synthetic construct; identical to SEQ ID NO: 7244
  misc_feature 1..31: note = Probe
  source 1..31: mol_type = other DNA

SEQ ID NO: 49974 - DNA, 32 bp, synthetic construct; identical to SEQ ID NO: 7245
  misc_feature 1..32: note = Probe
  source 1..32: mol_type = other DNA

SEQ ID NO: 49975 - DNA, 33 bp, synthetic construct; identical to SEQ ID NO: 1537
  misc_feature 1..33: note = Probe
  source 1..33: mol_type = other DNA

SEQ ID NO: 49976 - DNA, 37 bp, synthetic construct; identical to SEQ ID NO: 1541
  misc_feature 1..37: note = Probe
  source 1..37: mol_type = other DNA

SEQ ID NO: 49977 - DNA, 38 bp, synthetic construct; identical to SEQ ID NO: 7246
  misc_feature 1..38: note = Probe
  source 1..38: mol_type = other DNA

SEQ ID NO: 49978 - DNA, 39 bp, synthetic construct; identical to SEQ ID NO: 7247
  misc_feature 1..39: note = Probe
  source 1..39: mol_type = other DNA

SEQ ID NO: 49979 - DNA, 41 bp, synthetic construct; identical to SEQ ID NO: 7248
  misc_feature 1..41: note = Probe
  source 1..41: mol_type = other DNA

SEQ ID NO: 49980 - DNA, 42 bp, synthetic construct; identical to SEQ ID NO: 23075
  misc_feature 1..42: note = Probe
  source 1..42: mol_type = other DNA

SEQ ID NO: 49981 - DNA, 43 bp, synthetic construct; identical to SEQ ID NO: 7249
  misc_feature 1..43: note = Probe
  source 1..43: mol_type = other DNA

SEQ ID NO: 49982 - DNA, 44 bp, synthetic construct; identical to SEQ ID NO: 7250
  misc_feature 1..44: note = Probe
  source 1..44: mol_type = other DNA

SEQ ID NO: 49983 - DNA, 45 bp, synthetic construct
  misc_feature 1..45: note = Probe
  source 1..45: mol_type = other DNA
gtttatgtagcttacctcctcaaagcaatacactgaaaatgttta

SEQ ID NO: 49984 - DNA, 50 bp, synthetic construct; identical to SEQ ID NO: 7251
  misc_feature 1..50: note = Probe
  source 1..50: mol_type = other DNA

SEQ ID NO: 49985 - DNA, 28 bp, synthetic construct
  misc_feature 1..28: note = Probe
  source 1..28: mol_type = other DNA
gtttccgtagtggagtggttatcacgtt

SEQ ID NO: 49986 - DNA, 31 bp, synthetic construct; identical to SEQ ID NO: 23081
  misc_feature 1..31: note = Probe
  source 1..31: mol_type = other DNA

SEQ ID NO: 49987 - DNA, 32 bp, synthetic construct; identical to SEQ ID NO: 23082
  misc_feature 1..32: note = Probe
  source 1..32: mol_type = other DNA

SEQ ID NO: 49988 - DNA, 33 bp, synthetic construct; identical to SEQ ID NO: 7252
  misc_feature 1..33: note = Probe
  source 1..33: mol_type = other DNA

SEQ ID NO: 49989 - DNA, 34 bp, synthetic construct; identical to SEQ ID NO: 23084
  misc_feature 1..34: note = Probe
  source 1..34: mol_type = other DNA

SEQ ID NO: 49990 - DNA, 17 bp, synthetic construct
  misc_feature 1..17: note = Probe
  source 1..17: mol_type = other DNA
gtttccgtagtgtagcg

SEQ ID NO: 49991 - DNA, 18 bp, synthetic construct
  misc_feature 1..18: note = Probe
  source 1..18: mol_type = other DNA
gtttccgtagtgtagcgg

SEQ ID NO: 49992 - DNA, 24 bp, synthetic construct
  misc_feature 1..24: note = Probe
  source 1..24: mol_type = other DNA
gtttccgtagtgtagcggttatca

SEQ ID NO: 49993 - DNA, 16 bp, synthetic construct
  misc_feature 1..16: note = Probe
  source 1..16: mol_type = other DNA
gtttccgtagtgtagt

SEQ ID NO: 49994 - DNA, 17 bp, synthetic construct
  misc_feature 1..17: note = Probe
  source 1..17: mol_type = other DNA
gtttccgtagtgtagtg

SEQ ID NO: 49995 - DNA, 18 bp, synthetic construct
  misc_feature 1..18: note = Probe
  source 1..18: mol_type = other DNA
gtttccgtagtgtagtgg

SEQ ID NO: 49996 - DNA, 19 bp, synthetic construct
  misc_feature 1..19: note = Probe
  source 1..19: mol_type = other DNA
gtttccgtagtgtagtggt

SEQ ID NO: 49997 - DNA, 20 bp, synthetic construct
  misc_feature 1..20: note = Probe
  source 1..20: mol_type = other DNA
gtttccgtagtgtagtggtc

SEQ ID NO: 49998 - DNA, 21 bp, synthetic construct
  misc_feature 1..21: note = Probe
  source 1..21: mol_type = other DNA
gtttccgtagtgtagtggtca

SEQ ID NO: 49999 - DNA, 22 bp, synthetic construct
  misc_feature 1..22: note = Probe
  source 1..22: mol_type = other DNA
gtttccgtagtgtagtggtcat

SEQ ID NO: 50000 - DNA, 24 bp, synthetic construct
  misc_feature 1..24: note = Probe
  source 1..24: mol_type = other DNA
gtttccgtagtgtagtggtcatca

SEQ ID NO: 50001 - DNA, 25 bp, synthetic construct
  misc_feature 1..25: note = Probe
  source 1..25: mol_type = other DNA
gtttccgtagtgtagtggtcatcac

SEQ ID NO: 50002 - DNA, 34 bp, synthetic construct; identical to SEQ ID NO: 7259
  misc_feature 1..34: note = Probe
  source 1..34: mol_type = other DNA

SEQ ID NO: 50003 - DNA, 35 bp, synthetic construct; identical to SEQ ID NO: 7260
  misc_feature 1..35: note = Probe
  source 1..35: mol_type = other DNA

SEQ ID NO: 50004 - DNA, 36 bp, synthetic construct; identical to SEQ ID NO: 7261
  misc_feature 1..36: note = Probe
  source 1..36: mol_type = other DNA

SEQ ID NO: 50005 - DNA, 37 bp, synthetic construct; identical to SEQ ID NO: 7262
  misc_feature 1..37: note = Probe
  source 1..37: mol_type = other DNA

SEQ ID NO: 50006 - DNA, 50 bp, synthetic construct; identical to SEQ ID NO: 7263
  misc_feature 1..50: note = Probe
  source 1..50: mol_type = other DNA

SEQ ID NO: 50007 - DNA, 20 bp, synthetic construct
  misc_feature 1..20: note = Probe
  source 1..20: mol_type = other DNA
gtttccgtagtgtagtggtt

SEQ ID NO: 50008 - DNA, 21 bp, synthetic construct
  misc_feature 1..21: note = Probe
  source 1..21: mol_type = other DNA
gtttccgtagtgtagtggtta

SEQ ID NO: 50009 - DNA, 22 bp, synthetic construct
  misc_feature 1..22: note = Probe
  source 1..22: mol_type = other DNA
gtttccgtagtgtagtggttat

SEQ ID NO: 50010 - DNA, 23 bp, synthetic construct
  misc_feature 1..23: note = Probe
  source 1..23: mol_type = other DNA
gtttccgtagtgtagtggttatc

SEQ ID NO: 50011 - DNA, 24 bp, synthetic construct
  misc_feature 1..24: note = Probe
  source 1..24: mol_type = other DNA
gtttccgtagtgtagtggttatca

SEQ ID NO: 50012 - DNA, 25 bp, synthetic construct
  misc_feature 1..25: note = Probe
  source 1..25: mol_type = other DNA
gtttccgtagtgtagtggttatcac

SEQ ID NO: 50013 - DNA, 26 bp, synthetic construct
  misc_feature 1..26: note = Probe
  source 1..26: mol_type = other DNA
gtttccgtagtgtagtggttatcacg

SEQ ID NO: 50014 - DNA, 27 bp, synthetic construct
  misc_feature 1..27: note = Probe
  source 1..27: mol_type = other DNA
gtttccgtagtgtagtggttatcacgt

SEQ ID NO: 50015 - DNA, 28 bp, synthetic construct
  misc_feature 1..28: note = Probe
  source 1..28: mol_type = other DNA
gtttccgtagtgtagtggttatcacgtt

SEQ ID NO: 50016 - DNA, 29 bp, synthetic construct
  misc_feature 1..29: note = Probe
  source 1..29: mol_type = other DNA
gtttccgtagtgtagtggttatcacgttc

SEQ ID NO: 50017 - DNA, 30 bp, synthetic construct; identical to SEQ ID NO: 7273
  misc_feature 1..30: note = Probe
  source 1..30: mol_type = other DNA

SEQ ID NO: 50018 - DNA, 31 bp, synthetic construct; identical to SEQ ID NO: 7274
  misc_feature 1..31: note = Probe
  source 1..31: mol_type = other DNA

SEQ ID NO: 50019 - DNA, 32 bp, synthetic construct; identical to SEQ ID NO: 7275
  misc_feature 1..32: note = Probe
  source 1..32: mol_type = other DNA

SEQ ID NO: 50020 - DNA, 33 bp, synthetic construct; identical to SEQ ID NO: 7276
  misc_feature 1..33: note = Probe
  source 1..33: mol_type = other DNA

SEQ ID NO: 50021 - DNA, 40 bp, synthetic construct; identical to SEQ ID NO: 23125
  misc_feature 1..40: note = Probe
  source 1..40: mol_type = other DNA

SEQ ID NO: 50022 - DNA, 50 bp, synthetic construct; identical to SEQ ID NO: 7277
  misc_feature 1..50: note = Probe
  source 1..50: mol_type = other DNA

SEQ ID NO: 50023 - DNA, 34 bp, synthetic construct; identical to SEQ ID NO: 7278
  misc_feature 1..34: note = Probe
  source 1..34: mol_type = other DNA

SEQ ID NO: 50024 - DNA, 35 bp, synthetic construct; identical to SEQ ID NO: 7279
  misc_feature 1..35: note = Probe
  source 1..35: mol_type = other DNA

SEQ ID NO: 50025 - DNA, 36 bp, synthetic construct; identical to SEQ ID NO: 7280
  misc_feature 1..36: note = Probe
  source 1..36: mol_type = other DNA

SEQ ID NO: 50026 - DNA, 37 bp, synthetic construct; identical to SEQ ID NO: 7281
  misc_feature 1..37: note = Probe
  source 1..37: mol_type = other DNA

SEQ ID NO: 50027 - DNA, 40 bp, synthetic construct; identical to SEQ ID NO: 14160
  misc_feature 1..40: note = Probe
  source 1..40: mol_type = other DNA

SEQ ID NO: 50028 - DNA, 41 bp, synthetic construct; identical to SEQ ID NO: 23134
  misc_feature 1..41: note = Probe
  source 1..41: mol_type = other DNA

SEQ ID NO: 50029 - DNA, 32 bp, synthetic construct; identical to SEQ ID NO: 23138
  misc_feature 1..32: note = Probe
  source 1..32: mol_type = other DNA

SEQ ID NO: 50030 - DNA, 33 bp, synthetic construct; identical to SEQ ID NO: 23139
  misc_feature 1..33: note = Probe
  source 1..33: mol_type = other DNA

SEQ ID NO: 50031 - DNA, 28 bp, synthetic construct
  misc_feature 1..28: note = Probe
  source 1..28: mol_type = other DNA
gtttccgtagtgtagtggttattatgtt

SEQ ID NO: 50032 - DNA, 31 bp, synthetic construct; identical to SEQ ID NO: 23143
  misc_feature 1..31: note = Probe
  source 1..31: mol_type = other DNA

SEQ ID NO: 50033 - DNA, 32 bp, synthetic construct; identical to SEQ ID NO: 23144
  misc_feature 1..32: note = Probe
  source 1..32: mol_type = other DNA

SEQ ID NO: 50034 - DNA, 33 bp, synthetic construct; identical to SEQ ID NO: 7282
  misc_feature 1..33: note = Probe
  source 1..33: mol_type = other DNA

SEQ ID NO: 50035 - DNA, 28 bp, synthetic construct
  misc_feature 1..28: note = Probe
  source 1..28: mol_type = other DNA
gtttccgtggtgtagtggttatcacatt

SEQ ID NO: 50036 - DNA, 30 bp, synthetic construct; identical to SEQ ID NO: 11583
  misc_feature 1..30: note = Probe
  source 1..30: mol_type = other DNA

SEQ ID NO: 50037 - DNA, 31 bp, synthetic construct; identical to SEQ ID NO: 23150
  misc_feature 1..31: note = Probe
  source 1..31: mol_type = other DNA

SEQ ID NO: 50038 - DNA, 32 bp, synthetic construct; identical to SEQ ID NO: 7284
  misc_feature 1..32: note = Probe
  source 1..32: mol_type = other DNA

SEQ ID NO: 50039 - DNA, 33 bp, synthetic construct; identical to SEQ ID NO: 7285
  misc_feature 1..33: note = Probe
  source 1..33: mol_type = other DNA

SEQ ID NO: 50040 - DNA, 25 bp, synthetic construct
  misc_feature 1..25: note = Probe
  source 1..25: mol_type = other DNA
gtttggtcctagcctttctattagc

SEQ ID NO: 50041 - DNA, 16 bp, synthetic construct
  misc_feature 1..16: note = Probe
  source 1..16: mol_type = other DNA
gtttgtgggtttaagt

SEQ ID NO: 50042 - DNA, 17 bp, synthetic construct
  misc_feature 1..17: note = Probe
  source 1..17: mol_type = other DNA
gtttgtgggtttaagtc

SEQ ID NO: 50043 - DNA, 18 bp, synthetic construct
  misc_feature 1..18: note = Probe
  source 1..18: mol_type = other DNA
gtttgtgggtttaagtcc

SEQ ID NO: 50044 - DNA, 19 bp, synthetic construct
  misc_feature 1..19: note = Probe
  source 1..19: mol_type = other DNA
gtttgtgggtttaagtccc

SEQ ID NO: 50045 - DNA, 23 bp, synthetic construct
  misc_feature 1..23: note = Probe
  source 1..23: mol_type = other DNA
gtttgtgggtttaagtcccattg

SEQ ID NO: 50046 - DNA, 24 bp, synthetic construct
  misc_feature 1..24: note = Probe
  source 1..24: mol_type = other DNA
gtttgtgggtttaagtcccattgg

SEQ ID NO: 50047 - DNA, 25 bp, synthetic construct
  misc_feature 1..25: note = Probe
  source 1..25: mol_type = other DNA
gtttgtgggtttaagtcccattggt

SEQ ID NO: 50048 - DNA, 28 bp, synthetic construct
  misc_feature 1..28: note = Probe
  source 1..28: mol_type = other DNA
gtttgtgggtttaagtcccattggtcta

SEQ ID NO: 50049 - DNA, 29 bp, synthetic construct
  misc_feature 1..29: note = Probe
  source 1..29: mol_type = other DNA
gtttgtgggtttaagtcccattggtctag

SEQ ID NO: 50050 - DNA, 30 bp, synthetic construct; identical to SEQ ID NO: 7300
  misc_feature 1..30: note = Probe
  source 1..30: mol_type = other DNA

SEQ ID NO: 50051 - DNA, 31 bp, synthetic construct; identical to SEQ ID NO: 7301
  misc_feature 1..31: note = Probe
  source 1..31: mol_type = other DNA

SEQ ID NO: 50052 - DNA, 32 bp, synthetic construct; identical to SEQ ID NO: 7302
  misc_feature 1..32: note = Probe
  source 1..32: mol_type = other DNA

SEQ ID NO: 50053 - DNA, 33 bp, synthetic construct; identical to SEQ ID NO: 7303
  misc_feature 1..33: note = Probe
  source 1..33: mol_type = other DNA

SEQ ID NO: 50054 - DNA, 34 bp, synthetic construct; identical to SEQ ID NO: 7304
  misc_feature 1..34: note = Probe
  source 1..34: mol_type = other DNA

SEQ ID NO: 50055 - DNA, 35 bp, synthetic construct; identical to SEQ ID NO: 7305
  misc_feature 1..35: note = Probe
  source 1..35: mol_type = other DNA

SEQ ID NO: 50056 - DNA, 36 bp, synthetic construct; identical to SEQ ID NO: 23172
  misc_feature 1..36: note = Probe
  source 1..36: mol_type = other DNA

SEQ ID NO: 50057 - DNA, 37 bp, synthetic construct
  misc_feature 1..37: note = Probe
  source 1..37: mol_type = other DNA
gtttgtgggtttaagtcccattggtctagtaagggct

SEQ ID NO: 50058 - DNA, 28 bp, synthetic construct
  misc_feature 1..28: note = Probe
  source 1..28: mol_type = other DNA
gtttttcatatcattggtcgtggttgta

SEQ ID NO: 50059 - DNA, 37 bp, synthetic construct
  misc_feature 1..37: note = Probe
  source 1..37: mol_type = other DNA
gtttttcatatcattggtcgtggttgtagtccgtgcg

SEQ ID NO: 50060 - DNA, 39 bp, synthetic construct
  misc_feature 1..39: note = Probe
  source 1..39: mol_type = other DNA
gtttttcatatcattggtcgtggttgtagtccgtgcgag

SEQ ID NO: 50061 - DNA, 40 bp, synthetic construct; identical to SEQ ID NO: 33585
  misc_feature 1..40: note = Probe
  source 1..40: mol_type = other DNA

SEQ ID NO: 50062 - DNA, 45 bp, synthetic construct; identical to SEQ ID NO: 33588
  misc_feature 1..45: note = Probe
  source 1..45: mol_type = other DNA

SEQ ID NO: 50063 - DNA, 46 bp, synthetic construct; identical to SEQ ID NO: 7307
  misc_feature 1..46: note = Probe
  source 1..46: mol_type = other DNA

SEQ ID NO: 50064 - DNA, 38 bp, synthetic construct; identical to SEQ ID NO: 7312
  misc_feature 1..38: note = Probe
  source 1..38: mol_type = other DNA

SEQ ID NO: 50065 - DNA, 39 bp, synthetic construct; identical to SEQ ID NO: 7313
  misc_feature 1..39: note = Probe
  source 1..39: mol_type = other DNA

SEQ ID NO: 50066 - DNA, 40 bp, synthetic construct; identical to SEQ ID NO: 23177
  misc_feature 1..40: note = Probe
  source 1..40: mol_type = other DNA

SEQ ID NO: 50067 - DNA, 42 bp, synthetic construct; identical to SEQ ID NO: 7314
  misc_feature 1..42: note = Probe
  source 1..42: mol_type = other DNA

SEQ ID NO: 50068 - DNA, 50 bp, synthetic construct
  misc_feature 1..50: note = Probe
  source 1..50: mol_type = other DNA
taaaagagttactttgatagagtaaataataggagcttaaacccccttat

SEQ ID NO: 50069 - DNA, 39 bp, synthetic construct; identical to SEQ ID NO: 7318
  misc_feature 1..39: note = Probe
  source 1..39: mol_type = other DNA

SEQ ID NO: 50070 - DNA, 50 bp, synthetic construct; identical to SEQ ID NO: 7321
  misc_feature 1..50: note = Probe
  source 1..50: mol_type = other DNA

SEQ ID NO: 50071 - DNA, 41 bp, synthetic construct; identical to SEQ ID NO: 7322
  misc_feature 1..41: note = Probe
  source 1..41: mol_type = other DNA

SEQ ID NO: 50072 - DNA, 36 bp, synthetic construct; identical to SEQ ID NO: 7329
  misc_feature 1..36: note = Probe
  source 1..36: mol_type = other DNA

SEQ ID NO: 50073 - DNA, 28 bp, synthetic construct
  misc_feature 1..28: note = Probe
  source 1..28: mol_type = other DNA
taaacctagccccaaacccactccacct

SEQ ID NO: 50074 - DNA, 29 bp, synthetic construct
  misc_feature 1..29: note = Probe
  source 1..29: mol_type = other DNA
taaagacaggggttaggcctctttttacc

SEQ ID NO: 50075 - DNA, 34 bp, synthetic construct; identical to SEQ ID NO: 23200
  misc_feature 1..34: note = Probe
  source 1..34: mol_type = other DNA

SEQ ID NO: 50076 - DNA, 35 bp, synthetic construct; identical to SEQ ID NO: 23201
  misc_feature 1..35: note = Probe
  source 1..35: mol_type = other DNA

SEQ ID NO: 50077 - DNA, 37 bp, synthetic construct; identical to SEQ ID NO: 7331
  misc_feature 1..37: note = Probe
  source 1..37: mol_type = other DNA

SEQ ID NO: 50078 - DNA, 38 bp, synthetic construct; identical to SEQ ID NO: 7332
  misc_feature 1..38: note = Probe
  source 1..38: mol_type = other DNA

SEQ ID NO: 50079 - DNA, 31 bp, synthetic construct; identical to SEQ ID NO: 7336
  misc_feature 1..31: note = Probe
  source 1..31: mol_type = other DNA

SEQ ID NO: 50080 - DNA, 50 bp, synthetic construct; identical to SEQ ID NO: 7339
  misc_feature 1..50: note = Probe
  source 1..50: mol_type = other DNA

SEQ ID NO: 50081 - DNA, 50 bp, synthetic construct; identical to SEQ ID NO: 7341
  misc_feature 1..50: note = Probe
  source 1..50: mol_type = other DNA

SEQ ID NO: 50082 - DNA, 21 bp, synthetic construct
  misc_feature 1..21: note = Probe
  source 1..21: mol_type = other DNA
taacaacatggctttctcaac

SEQ ID NO: 50083 - DNA, 16 bp, synthetic construct
  misc_feature 1..16: note = Probe
  source 1..16: mol_type = other DNA
taacacaaagcaccca

SEQ ID NO: 50084 - DNA, 18 bp, synthetic construct
  misc_feature 1..18: note = Probe
  source 1..18: mol_type = other DNA
taacacaaagcacccaac

SEQ ID NO: 50085 - DNA, 19 bp, synthetic construct
  misc_feature 1..19: note = Probe
  source 1..19: mol_type = other DNA
taacacaaagcacccaact

SEQ ID NO: 50086 - DNA, 23 bp, synthetic construct
  misc_feature 1..23: note = Probe
  source 1..23: mol_type = other DNA
taacacaaagcacccaacttaca

SEQ ID NO: 50087 - DNA, 25 bp, synthetic construct
  misc_feature 1..25: note = Probe
  source 1..25: mol_type = other DNA
taacacaaagcacccaacttacact

SEQ ID NO: 50088 - DNA, 26 bp, synthetic construct
  misc_feature 1..26: note = Probe
  source 1..26: mol_type = other DNA
taacacaaagcacccaacttacactt

SEQ ID NO: 50089 - DNA, 27 bp, synthetic construct
  misc_feature 1..27: note = Probe
  source 1..27: mol_type = other DNA
taacacaaagcacccaacttacactta

SEQ ID NO: 50090 - DNA, 28 bp, synthetic construct
  misc_feature 1..28: note = Probe
  source 1..28: mol_type = other DNA
taacacaaagcacccaacttacacttag

SEQ ID NO: 50091 - DNA, 30 bp, synthetic construct; identical to SEQ ID NO: 7355
  misc_feature 1..30: note = Probe
  source 1..30: mol_type = other DNA

SEQ ID NO: 50092 - DNA, 31 bp, synthetic construct; identical to SEQ ID NO: 23224
  misc_feature 1..31: note = Probe
  source 1..31: mol_type = other DNA

SEQ ID NO: 50093 - DNA, 32 bp, synthetic construct; identical to SEQ ID NO: 7356
  misc_feature 1..32: note = Probe
  source 1..32: mol_type = other DNA

SEQ ID NO: 50094 - DNA, 33 bp, synthetic construct; identical to SEQ ID NO: 23226
  misc_feature 1..33: note = Probe
  source 1..33: mol_type = other DNA

SEQ ID NO: 50095 - DNA, 34 bp, synthetic construct
  misc_feature 1..34: note = Probe
  source 1..34: mol_type = other DNA
taacacaaagcacccaacttacacttaggagatt

SEQ ID NO: 50096 - DNA, 35 bp, synthetic construct
  misc_feature 1..35: note = Probe
  source 1..35: mol_type = other DNA
taacacaaagcacccaacttacacttaggagattt

SEQ ID NO: 50097 - DNA, 36 bp, synthetic construct; identical to SEQ ID NO: 33673
  misc_feature 1..36: note = Probe
  source 1..36: mol_type = other DNA

SEQ ID NO: 50098 - DNA, 37 bp, synthetic construct; identical to SEQ ID NO: 7357
  misc_feature 1..37: note = Probe
  source 1..37: mol_type = other DNA

SEQ ID NO: 50099 - DNA, 39 bp, synthetic construct; identical to SEQ ID NO: 7358
  misc_feature 1..39: note = Probe
  source 1..39: mol_type = other DNA

SEQ ID NO: 50100 - DNA, 41 bp, synthetic construct; identical to SEQ ID NO: 7359
  misc_feature 1..41: note = Probe
  source 1..41: mol_type = other DNA

SEQ ID NO: 50101 - DNA, 45 bp, synthetic construct
  misc_feature 1..45: note = Probe
  source 1..45: mol_type = other DNA
taacacaaagcacccaacttacacttaggagatttcaacttaact

SEQ ID NO: 50102 - DNA, 46 bp, synthetic construct
  misc_feature 1..46: note = Probe
  source 1..46: mol_type = other DNA
taacacaaagcacccaacttacacttaggagatttcaacttaactt

SEQ ID NO: 50103 - DNA, 22 bp, synthetic construct
  misc_feature 1..22: note = Probe
  source 1..22: mol_type = other DNA
taacacgcgaaaggtccccggt

SEQ ID NO: 50104 - DNA, 18 bp, synthetic construct
  misc_feature 1..18: note = Probe
  source 1..18: mol_type = other DNA
taacagctatccattggt

SEQ ID NO: 50105 - DNA, 30 bp, synthetic construct; identical to SEQ ID NO: 7365
  misc_feature 1..30: note = Probe
  source 1..30: mol_type = other DNA

SEQ ID NO: 50106 - DNA, 31 bp, synthetic construct; identical to SEQ ID NO: 7366
  misc_feature 1..31: note = Probe
  source 1..31: mol_type = other DNA

SEQ ID NO: 50107 - DNA, 32 bp, synthetic construct; identical to SEQ ID NO: 7367
  misc_feature 1..32: note = Probe
  source 1..32: mol_type = other DNA

SEQ ID NO: 50108 - DNA, 33 bp, synthetic construct; identical to SEQ ID NO: 7368
  misc_feature 1..33: note = Probe
  source 1..33: mol_type = other DNA

SEQ ID NO: 50109 - DNA, 34 bp, synthetic construct; identical to SEQ ID NO: 23249
  misc_feature 1..34: note = Probe
  source 1..34: mol_type = other DNA

SEQ ID NO: 50110 - DNA, 35 bp, synthetic construct; identical to SEQ ID NO: 23250
  misc_feature 1..35: note = Probe
  source 1..35: mol_type = other DNA

SEQ ID NO: 50111 - DNA, 37 bp, synthetic construct; identical to SEQ ID NO: 7369
  misc_feature 1..37: note = Probe
  source 1..37: mol_type = other DNA

SEQ ID NO: 50112 - DNA, 38 bp, synthetic construct; identical to SEQ ID NO: 7370
  misc_feature 1..38: note = Probe
  source 1..38: mol_type = other DNA

SEQ ID NO: 50113 - DNA, 39 bp, synthetic construct; identical to SEQ ID NO: 7371
  misc_feature 1..39: note = Probe
  source 1..39: mol_type = other DNA

SEQ ID NO: 50114 - DNA, 36 bp, synthetic construct
  misc_feature 1..36: note = Probe
  source 1..36: mol_type = other DNA
taaccgaaaggttggtggttcgagcccacccaggga

SEQ ID NO: 50115 - DNA, 38 bp, synthetic construct
  misc_feature 1..38: note = Probe
  source 1..38: mol_type = other DNA
taaccgaaaggttggtggttcgagcccacccagggacg

SEQ ID NO: 50116 - DNA, 40 bp, synthetic construct; identical to SEQ ID NO: 1570
  misc_feature 1..40: note = Probe
  source 1..40: mol_type = other DNA

SEQ ID NO: 50117 - DNA, 41 bp, synthetic construct; identical to SEQ ID NO: 7378
  misc_feature 1..41: note = Probe
  source 1..41: mol_type = other DNA

SEQ ID NO: 50118 - DNA, 40 bp, synthetic construct
  misc_feature 1..40: note = Probe
  source 1..40: mol_type = other DNA
taaccgaaaggttggtggttcgagcccacccagggacgcg

SEQ ID NO: 50119 - DNA, 40 bp, synthetic construct
  misc_feature 1..40: note = Probe
  source 1..40: mol_type = other DNA
taaccgaaaggttggtggttcgagcccacccagggacgct

SEQ ID NO: 50120 - DNA, 50 bp, synthetic construct; identical to SEQ ID NO: 7379
  misc_feature 1..50: note = Probe
  source 1..50: mol_type = other DNA

SEQ ID NO: 50121 - DNA, 35 bp, synthetic construct
  misc_feature 1..35: note = Probe
  source 1..35: mol_type = other DNA
taactaagtgtttgtgggtttaagtcccattggtc

SEQ ID NO: 50122 - DNA, 36 bp, synthetic construct; identical to SEQ ID NO: 23261
  misc_feature 1..36: note = Probe
  source 1..36: mol_type = other DNA

SEQ ID NO: 50123 - DNA, 40 bp, synthetic construct
  misc_feature 1..40: note = Probe
  source 1..40: mol_type = other DNA
taactaagtgtttgtgggtttaagtcccattggtctagta

SEQ ID NO: 50124 - DNA, 41 bp, synthetic construct; identical to SEQ ID NO: 7382
  misc_feature 1..41: note = Probe
  source 1..41: mol_type = other DNA

SEQ ID NO: 50125 - DNA, 33 bp, synthetic construct; identical to SEQ ID NO: 7388
  misc_feature 1..33: note = Probe
  source 1..33: mol_type = other DNA

SEQ ID NO: 50126 - DNA, 35 bp, synthetic construct; identical to SEQ ID NO: 7390
  misc_feature 1..35: note = Probe
  source 1..35: mol_type = other DNA

SEQ ID NO: 50127 - DNA, 36 bp, synthetic construct; identical to SEQ ID NO: 7391
  misc_feature 1..36: note = Probe
  source 1..36: mol_type = other DNA

SEQ ID NO: 50128 - DNA, 40 bp, synthetic construct; identical to SEQ ID NO: 7395
  misc_feature 1..40: note = Probe
  source 1..40: mol_type = other DNA

SEQ ID NO: 50129 - DNA, 41 bp, synthetic construct; identical to SEQ ID NO: 7396
  misc_feature 1..41: note = Probe
  source 1..41: mol_type = other DNA

SEQ ID NO: 50130 - DNA, 46 bp, synthetic construct; identical to SEQ ID NO: 7399
  misc_feature 1..46: note = Probe
  source 1..46: mol_type = other DNA

SEQ ID NO: 50131 - DNA, 19 bp, synthetic construct
  misc_feature 1..19: note = Probe
  source 1..19: mol_type = other DNA
taacttgaccgctctgagc

SEQ ID NO: 50132 - DNA, 20 bp, synthetic construct
  misc_feature 1..20: note = Probe
  source 1..20: mol_type = other DNA
taacttgaccgctctgagct

SEQ ID NO: 50133 - DNA, 31 bp, synthetic construct; identical to SEQ ID NO: 7406
  misc_feature 1..31: note = Probe
  source 1..31: mol_type = other DNA

SEQ ID NO: 50134 - DNA, 18 bp, synthetic construct
  misc_feature 1..18: note = Probe
  source 1..18: mol_type = other DNA
taagctatcgggcccata

SEQ ID NO: 50135 - DNA, 23 bp, synthetic construct
  misc_feature 1..23: note = Probe
  source 1..23: mol_type = other DNA
taagctatcgggcccataccccg

SEQ ID NO: 50136 - DNA, 24 bp, synthetic construct
  misc_feature 1..24: note = Probe
  source 1..24: mol_type = other DNA
taagctatcgggcccataccccga

SEQ ID NO: 50137 - DNA, 25 bp, synthetic construct
  misc_feature 1..25: note = Probe
  source 1..25: mol_type = other DNA
taagctatcgggcccataccccgaa

SEQ ID NO: 50138 - DNA, 26 bp, synthetic construct
  misc_feature 1..26: note = Probe
  source 1..26: mol_type = other DNA
taagctatcgggcccataccccgaaa

SEQ ID NO: 50139 - DNA, 27 bp, synthetic construct
  misc_feature 1..27: note = Probe
  source 1..27: mol_type = other DNA
taagctatcgggcccataccccgaaaa

SEQ ID NO: 50140 - DNA, 28 bp, synthetic construct
  misc_feature 1..28: note = Probe
  source 1..28: mol_type = other DNA
taagctatcgggcccataccccgaaaat

SEQ ID NO: 50141 - DNA, 29 bp, synthetic construct
  misc_feature 1..29: note = Probe
  source 1..29: mol_type = other DNA
taagctatcgggcccataccccgaaaatg

SEQ ID NO: 50142 - DNA, 30 bp, synthetic construct; identical to SEQ ID NO: 7423
  misc_feature 1..30: note = Probe
  source 1..30: mol_type = other DNA

SEQ ID NO: 50143 - DNA, 31 bp, synthetic construct; identical to SEQ ID NO: 7424
  misc_feature 1..31: note = Probe
  source 1..31: mol_type = other DNA

SEQ ID NO: 50144 - DNA, 32 bp, synthetic construct; identical to SEQ ID NO: 7425
  misc_feature 1..32: note = Probe
  source 1..32: mol_type = other DNA

SEQ ID NO: 50145 - DNA, 33 bp, synthetic construct; identical to SEQ ID NO: 7426
  misc_feature 1..33: note = Probe
  source 1..33: mol_type = other DNA

SEQ ID NO: 50146 - DNA, 34 bp, synthetic construct; identical to SEQ ID NO: 7427
  misc_feature 1..34: note = Probe
  source 1..34: mol_type = other DNA

SEQ ID NO: 50147 - DNA, 35 bp, synthetic construct; identical to SEQ ID NO: 7428
  misc_feature 1..35: note = Probe
  source 1..35: mol_type = other DNA

SEQ ID NO: 50148 - DNA, 36 bp, synthetic construct; identical to SEQ ID NO: 7429
  misc_feature 1..36: note = Probe
  source 1..36: mol_type = other DNA

SEQ ID NO: 50149 - DNA, 49 bp, synthetic construct; identical to SEQ ID NO: 7435
  misc_feature 1..49: note = Probe
  source 1..49: mol_type = other DNA

SEQ ID NO: 50150 - DNA, 50 bp, synthetic construct; identical to SEQ ID NO: 1573
  misc_feature 1..50: note = Probe
  source 1..50: mol_type = other DNA

SEQ ID NO: 50151 - DNA, 31 bp, synthetic construct; identical to SEQ ID NO: 7440
  misc_feature 1..31: note = Probe
  source 1..31: mol_type = other DNA

SEQ ID NO: 50152 - DNA, 32 bp, synthetic construct; identical to SEQ ID NO: 7441
  misc_feature 1..32: note = Probe
  source 1..32: mol_type = other DNA

SEQ ID NO: 50153 - DNA, 33 bp, synthetic construct; identical to SEQ ID NO: 7442
  misc_feature 1..33: note = Probe
  source 1..33: mol_type = other DNA

SEQ ID NO: 50154 - DNA, 44 bp, synthetic construct; identical to SEQ ID NO: 7450
  misc_feature 1..44: note = Probe
  source 1..44: mol_type = other DNA

SEQ ID NO: 50155 - DNA, 50 bp, synthetic construct; identical to SEQ ID NO: 7454
  misc_feature 1..50: note = Probe
  source 1..50: mol_type = other DNA

SEQ ID NO: 50156 - DNA, 17 bp, synthetic construct
  misc_feature 1..17: note = Probe
  source 1..17: mol_type = other DNA
taagtgtttgtgggttt

SEQ ID NO: 50157 - DNA, 28 bp, synthetic construct
  misc_feature 1..28: note = Probe
  source 1..28: mol_type = other DNA
taagtgtttgtgggtttaagtcccattg

SEQ ID NO: 50158 - DNA, 29 bp, synthetic construct
  misc_feature 1..29: note = Probe
  source 1..29: mol_type = other DNA
taagtgtttgtgggtttaagtcccattgg

SEQ ID NO: 50159 - DNA, 33 bp, synthetic construct; identical to SEQ ID NO: 7458
  misc_feature 1..33: note = Probe
  source 1..33: mol_type = other DNA

SEQ ID NO: 50160 - DNA, 35 bp, synthetic construct; identical to SEQ ID NO: 23327
  misc_feature 1..35: note = Probe
  source 1..35: mol_type = other DNA

SEQ ID NO: 50161 - DNA, 36 bp, synthetic construct; identical to SEQ ID NO: 23328
  misc_feature 1..36: note = Probe
  source 1..36: mol_type = other DNA

SEQ ID NO: 50162 - DNA, 39 bp, synthetic construct
  misc_feature 1..39: note = Probe
  source 1..39: mol_type = other DNA
taagttaaagattaagagaaccaacacctctttacagtg

SEQ ID NO: 50163 - DNA, 43 bp, synthetic construct; identical to SEQ ID NO: 7460
  misc_feature 1..43: note = Probe
  source 1..43: mol_type = other DNA

SEQ ID NO: 50164 - DNA, 19 bp, synthetic construct
  misc_feature 1..19: note = Probe
  source 1..19: mol_type = other DNA
taatcatatttaccaaatg

SEQ ID NO: 50165 - DNA, 41 bp, synthetic construct; identical to SEQ ID NO: 7465
  misc_feature 1..41: note = Probe
  source 1..41: mol_type = other DNA

SEQ ID NO: 50166 - DNA, 29 bp, synthetic construct
  misc_feature 1..29: note = Probe
  source 1..29: mol_type = other DNA
taattgaaaacaaaatactcaaatgggcc

SEQ ID NO: 50167 - DNA, 30 bp, synthetic construct; identical to SEQ ID NO: 7468
  misc_feature 1..30: note = Probe
  source 1..30: mol_type = other DNA

SEQ ID NO: 50168 - DNA, 31 bp, synthetic construct; identical to SEQ ID NO: 7469
  misc_feature 1..31: note = Probe
  source 1..31: mol_type = other DNA

SEQ ID NO: 50169 - DNA, 32 bp, synthetic construct; identical to SEQ ID NO: 7470
  misc_feature 1..32: note = Probe
  source 1..32: mol_type = other DNA

SEQ ID NO: 50170 - DNA, 33 bp, synthetic construct; identical to SEQ ID NO: 7471
  misc_feature 1..33: note = Probe
  source 1..33: mol_type = other DNA

SEQ ID NO: 50171 - DNA, 50 bp, synthetic construct; identical to SEQ ID NO: 1574
  misc_feature 1..50: note = Probe
  source 1..50: mol_type = other DNA

SEQ ID NO: 50172 - DNA, 21 bp, synthetic construct
  misc_feature 1..21: note = Probe
  source 1..21: mol_type = other DNA
tacaatctccagcattccccc

SEQ ID NO: 50173 - DNA, 22 bp, synthetic construct
  misc_feature 1..22: note = Probe
  source 1..22: mol_type = other DNA
tacaatctccagcattccccct

SEQ ID NO: 50174 - DNA, 23 bp, synthetic construct
  misc_feature 1..23: note = Probe
  source 1..23: mol_type = other DNA
tacaatctccagcattccccctc

SEQ ID NO: 50175 - DNA, 24 bp, synthetic construct
  misc_feature 1..24: note = Probe
  source 1..24: mol_type = other DNA
tacaatctccagcattccccctca

SEQ ID NO: 50176 - DNA, 25 bp, synthetic construct
  misc_feature 1..25: note = Probe
  source 1..25: mol_type = other DNA
tacaatctccagcattccccctcaa

SEQ ID NO: 50177 - DNA, 27 bp, synthetic construct
  misc_feature 1..27: note = Probe
  source 1..27: mol_type = other DNA
tacaatctccagcattccccctcaaac

SEQ ID NO: 50178 - DNA, 28 bp, synthetic construct
  misc_feature 1..28: note = Probe
  source 1..28: mol_type = other DNA
tacaatctccagcattccccctcaaacc

SEQ ID NO: 50179 - DNA, 29 bp, synthetic construct
  misc_feature 1..29: note = Probe
  source 1..29: mol_type = other DNA
tacaatctccagcattccccctcaaacct

SEQ ID NO: 50180 - DNA, 30 bp, synthetic construct; identical to SEQ ID NO: 7478
  misc_feature 1..30: note = Probe
  source 1..30: mol_type = other DNA

SEQ ID NO: 50181 - DNA, 31 bp, synthetic construct; identical to SEQ ID NO: 7479
  misc_feature 1..31: note = Probe
  source 1..31: mol_type = other DNA

SEQ ID NO: 50182 - DNA, 50 bp, synthetic construct; identical to SEQ ID NO: 7482
  misc_feature 1..50: note = Probe
  source 1..50: mol_type = other DNA

SEQ ID NO: 50183 - DNA, 40 bp, synthetic construct
  misc_feature 1..40: note = Probe
  source 1..40: mol_type = other DNA
tacacgcagaaggtcctgggttcgagccccagtggaacca

SEQ ID NO: 50184 - DNA, 43 bp, synthetic construct; identical to SEQ ID NO: 7483
  misc_feature 1..43: note = Probe
  source 1..43: mol_type = other DNA

SEQ ID NO: 50185 - DNA, 45 bp, synthetic construct; identical to SEQ ID NO: 7484
  misc_feature 1..45: note = Probe
  source 1..45: mol_type = other DNA

SEQ ID NO: 50186 - DNA, 46 bp, synthetic construct; identical to SEQ ID NO: 7485
  misc_feature 1..46: note = Probe
  source 1..46: mol_type = other DNA

SEQ ID NO: 50187 - DNA, 18 bp, synthetic construct
  misc_feature 1..18: note = Probe
  source 1..18: mol_type = other DNA
tacacttaggagatttca

SEQ ID NO: 50188 - DNA, 23 bp, synthetic construct
  misc_feature 1..23: note = Probe
  source 1..23: mol_type = other DNA
tacacttaggagatttcaactta

SEQ ID NO: 50189 - DNA, 26 bp, synthetic construct
  misc_feature 1..26: note = Probe
  source 1..26: mol_type = other DNA
tacacttaggagatttcaacttaact

SEQ ID NO: 50190 - DNA, 28 bp, synthetic construct
  misc_feature 1..28: note = Probe
  source 1..28: mol_type = other DNA
tacacttaggagatttcaacttaacttg

SEQ ID NO: 50191 - DNA, 30 bp, synthetic construct; identical to SEQ ID NO: 7487
  misc_feature 1..30: note = Probe
  source 1..30: mol_type = other DNA

SEQ ID NO: 50192 - DNA, 31 bp, synthetic construct; identical to SEQ ID NO: 23360
  misc_feature 1..31: note = Probe
  source 1..31: mol_type = other DNA

SEQ ID NO: 50193 - DNA, 32 bp, synthetic construct; identical to SEQ ID NO: 7488
  misc_feature 1..32: note = Probe
  source 1..32: mol_type = other DNA

SEQ ID NO: 50194 - DNA, 33 bp, synthetic construct; identical to SEQ ID NO: 7489
  misc_feature 1..33: note = Probe
  source 1..33: mol_type = other DNA

SEQ ID NO: 50195 - DNA, 34 bp, synthetic construct; identical to SEQ ID NO: 7490
  misc_feature 1..34: note = Probe
  source 1..34: mol_type = other DNA

SEQ ID NO: 50196 - DNA, 36 bp, synthetic construct; identical to SEQ ID NO: 7492
  misc_feature 1..36: note = Probe
  source 1..36: mol_type = other DNA

SEQ ID NO: 50197 - DNA, 37 bp, synthetic construct; identical to SEQ ID NO: 7493
  misc_feature 1..37: note = Probe
  source 1..37: mol_type = other DNA

SEQ ID NO: 50198 - DNA, 38 bp, synthetic construct; identical to SEQ ID NO: 7494
  misc_feature 1..38: note = Probe
  source 1..38: mol_type = other DNA

SEQ ID NO: 50199 - DNA, 39 bp, synthetic construct; identical to SEQ ID NO: 7495
  misc_feature 1..39: note = Probe
  source 1..39: mol_type = other DNA

SEQ ID NO: 50200 - DNA, 40 bp, synthetic construct; identical to SEQ ID NO: 7496
  misc_feature 1..40: note = Probe
  source 1..40: mol_type = other DNA

SEQ ID NO: 50201 - DNA, 41 bp, synthetic construct; identical to SEQ ID NO: 7497
  misc_feature 1..41: note = Probe
  source 1..41: mol_type = other DNA

SEQ ID NO: 50202 - DNA, 42 bp, synthetic construct; identical to SEQ ID NO: 7498
  misc_feature 1..42: note = Probe
  source 1..42: mol_type = other DNA

SEQ ID NO: 50203 - DNA, 43 bp, synthetic construct; identical to SEQ ID NO: 7499
  misc_feature 1..43: note = Probe
  source 1..43: mol_type = other DNA

SEQ ID NO: 50204 - DNA, 25 bp, synthetic construct
  misc_feature 1..25: note = Probe
  source 1..25: mol_type = other DNA
tacagtcagaggttcaattcctctt

SEQ ID NO: 50205 - DNA, 26 bp, synthetic construct
  misc_feature 1..26: note = Probe
  source 1..26: mol_type = other DNA
tacagtcagaggttcaattcctcttc

SEQ ID NO: 50206 - DNA, 27 bp, synthetic construct
  misc_feature 1..27: note = Probe
  source 1..27: mol_type = other DNA
tacagtcagaggttcaattcctcttct

SEQ ID NO: 50207 - DNA, 28 bp, synthetic construct
  misc_feature 1..28: note = Probe
  source 1..28: mol_type = other DNA
tacagtcagaggttcaattcctcttctt

SEQ ID NO: 50208 - DNA, 29 bp, synthetic construct
  misc_feature 1..29: note = Probe
  source 1..29: mol_type = other DNA
tacagtcagaggttcaattcctcttctta

SEQ ID NO: 50209 - DNA, 28 bp, synthetic construct
  misc_feature 1..28: note = Probe
  source 1..28: mol_type = other DNA
tacccacacccacccaagaacagggttt

SEQ ID NO: 50210 - DNA, 29 bp, synthetic construct
  misc_feature 1..29: note = Probe
  source 1..29: mol_type = other DNA
tacccacacccacccaagaacagggtttg

SEQ ID NO: 50211 - DNA, 31 bp, synthetic construct; identical to SEQ ID NO: 7511
  misc_feature 1..31: note = Probe
  source 1..31: mol_type = other DNA

SEQ ID NO: 50212 - DNA, 32 bp, synthetic construct; identical to SEQ ID NO: 7512
  misc_feature 1..32: note = Probe
  source 1..32: mol_type = other DNA

SEQ ID NO: 50213 - DNA, 27 bp, synthetic construct
  misc_feature 1..27: note = Probe
  source 1..27: mol_type = other DNA
tacccatggccaacctcctactcctca

SEQ ID NO: 50214 - DNA, 25 bp, synthetic construct
  misc_feature 1..25: note = Probe
  source 1..25: mol_type = other DNA
taccccgaaaatgttggttataccc

SEQ ID NO: 50215 - DNA, 30 bp, synthetic construct; identical to SEQ ID NO: 7515
  misc_feature 1..30: note = Probe
  source 1..30: mol_type = other DNA

SEQ ID NO: 50216 - DNA, 31 bp, synthetic construct; identical to SEQ ID NO: 7516
  misc_feature 1..31: note = Probe
  source 1..31: mol_type = other DNA

SEQ ID NO: 50217 - DNA, 32 bp, synthetic construct; identical to SEQ ID NO: 7517
  misc_feature 1..32: note = Probe
  source 1..32: mol_type = other DNA

SEQ ID NO: 50218 - DNA, 37 bp, synthetic construct
  misc_feature 1..37: note = Probe
  source 1..37: mol_type = other DNA
taccccgaaaatgttggttatacccttcccgtactaa

SEQ ID NO: 50219 - DNA, 38 bp, synthetic construct; identical to SEQ ID NO: 7519
  misc_feature 1..38: note = Probe
  source 1..38: mol_type = other DNA

SEQ ID NO: 50220 - DNA, 39 bp, synthetic construct; identical to SEQ ID NO: 7520
  misc_feature 1..39: note = Probe
  source 1..39: mol_type = other DNA

SEQ ID NO: 50221 - DNA, 35 bp, synthetic construct
  misc_feature 1..35: note = Probe
  source 1..35: mol_type = other DNA
taccgttaacttccaattaactagttttgacaaca

SEQ ID NO: 50222 - DNA, 50 bp, synthetic construct; identical to SEQ ID NO: 7523
  misc_feature 1..50: note = Probe
  source 1..50: mol_type = other DNA

SEQ ID NO: 50223 - DNA, 24 bp, synthetic construct
  misc_feature 1..24: note = Probe
  source 1..24: mol_type = other DNA
tacctcctcaaagcaatacactga

SEQ ID NO: 50224 - DNA, 26 bp, synthetic construct
  misc_feature 1..26: note = Probe
  source 1..26: mol_type = other DNA
tactggaaagtgcacttggacgaacc

SEQ ID NO: 50225 - DNA, 50 bp, synthetic construct; identical to SEQ ID NO: 7535
  misc_feature 1..50: note = Probe
  source 1..50: mol_type = other DNA

SEQ ID NO: 50226 - DNA, 50 bp, synthetic construct; identical to SEQ ID NO: 1580
  misc_feature 1..50: note = Probe
  source 1..50: mol_type = other DNA

SEQ ID NO: 50227 - DNA, 22 bp, synthetic construct
  misc_feature 1..22: note = Probe
  source 1..22: mol_type = other DNA
tagacgggctcacatcacccca

SEQ ID NO: 50228 - DNA, 23 bp, synthetic construct
  misc_feature 1..23: note = Probe
  source 1..23: mol_type = other DNA
tagacgggctcacatcaccccat

SEQ ID NO: 50229 - DNA, 24 bp, synthetic construct
  misc_feature 1..24: note = Probe
  source 1..24: mol_type = other DNA
tagacgggctcacatcaccccata

SEQ ID NO: 50230 - DNA, 25 bp, synthetic construct
  misc_feature 1..25: note = Probe
  source 1..25: mol_type = other DNA
tagacgggctcacatcaccccataa

SEQ ID NO: 50231 - DNA, 26 bp, synthetic construct
  misc_feature 1..26: note = Probe
  source 1..26: mol_type = other DNA
tagacgggctcacatcaccccataaa

SEQ ID NO: 50232 - DNA, 28 bp, synthetic construct
  misc_feature 1..28: note = Probe
  source 1..28: mol_type = other DNA
tagacgggctcacatcaccccataaaca

SEQ ID NO: 50233 - DNA, 30 bp, synthetic construct; identical to SEQ ID NO: 7542
  misc_feature 1..30: note = Probe
  source 1..30: mol_type = other DNA

SEQ ID NO: 50234 - DNA, 31 bp, synthetic construct; identical to SEQ ID NO: 7543
  misc_feature 1..31: note = Probe
  source 1..31: mol_type = other DNA

SEQ ID NO: 50235 - DNA, 30 bp, synthetic construct
  misc_feature 1..30: note = Probe
  source 1..30: mol_type = other DNA
tagagtaaataataggagcttaaaccccct

SEQ ID NO: 50236 - DNA, 32 bp, synthetic construct; identical to SEQ ID NO: 1581
  misc_feature 1..32: note = Probe
  source 1..32: mol_type = other DNA

SEQ ID NO: 50237 - DNA, 37 bp, synthetic construct; identical to SEQ ID NO: 7549
  misc_feature 1..37: note = Probe
  source 1..37: mol_type = other DNA

SEQ ID NO: 50238 - DNA, 38 bp, synthetic construct; identical to SEQ ID NO: 23428
  misc_feature 1..38: note = Probe
  source 1..38: mol_type = other DNA

SEQ ID NO: 50239 - DNA, 39 bp, synthetic construct; identical to SEQ ID NO: 7550
  misc_feature 1..39: note = Probe
  source 1..39: mol_type = other DNA

SEQ ID NO: 50240 - DNA, 40 bp, synthetic construct; identical to SEQ ID NO: 7551
  misc_feature 1..40: note = Probe
  source 1..40: mol_type = other DNA

SEQ ID NO: 50241 - DNA, 41 bp, synthetic construct; identical to SEQ ID NO: 7552
  misc_feature 1..41: note = Probe
  source 1..41: mol_type = other DNA

SEQ ID NO: 50242 - DNA, 25 bp, synthetic construct
  misc_feature 1..25: note = Probe
  source 1..25: mol_type = other DNA
tagattgaagccagttgattagggt

SEQ ID NO: 50243 - DNA, 36 bp, synthetic construct; identical to SEQ ID NO: 7555
  misc_feature 1..36: note = Probe
  source 1..36: mol_type = other DNA

SEQ ID NO: 50244 - DNA, 41 bp, synthetic construct; identical to SEQ ID NO: 23442
  misc_feature 1..41: note = Probe
  source 1..41: mol_type = other DNA

SEQ ID NO: 50245 - DNA, 49 bp, synthetic construct; identical to SEQ ID NO: 23443
  misc_feature 1..49: note = Probe
  source 1..49: mol_type = other DNA

SEQ ID NO: 50246 - DNA, 31 bp, synthetic construct
  misc_feature 1..31: note = Probe
  source 1..31: mol_type = other DNA
tagcactctggactctgaatccagcgatccg

SEQ ID NO: 50247 - DNA, 49 bp, synthetic construct
  misc_feature 1..49: note = Probe
  source 1..49: mol_type = other DNA
tagcactctggactctgaatccagcgatccgagttcaaatctcggtgga

SEQ ID NO: 50248 - DNA, 33 bp, synthetic construct; identical to SEQ ID NO: 23451
  misc_feature 1..33: note = Probe
  source 1..33: mol_type = other DNA

SEQ ID NO: 50249 - DNA, 34 bp, synthetic construct; identical to SEQ ID NO: 14177
  misc_feature 1..34: note = Probe
  source 1..34: mol_type = other DNA

SEQ ID NO: 50250 - DNA, 35 bp, synthetic construct; identical to SEQ ID NO: 14178
  misc_feature 1..35: note = Probe
  source 1..35: mol_type = other DNA

SEQ ID NO: 50251 - DNA, 42 bp, synthetic construct; identical to SEQ ID NO: 23452
  misc_feature 1..42: note = Probe
  source 1..42: mol_type = other DNA

SEQ ID NO: 50252 - DNA, 49 bp, synthetic construct; identical to SEQ ID NO: 1585
  misc_feature 1..49: note = Probe
  source 1..49: mol_type = other DNA

SEQ ID NO: 50253 - DNA, 50 bp, synthetic construct; identical to SEQ ID NO: 1586
  misc_feature 1..50: note = Probe
  source 1..50: mol_type = other DNA

SEQ ID NO: 50254 - DNA, 21 bp, synthetic construct
  misc_feature 1..21: note = Probe
  source 1..21: mol_type = other DNA
tagccccaaacccactccacc

SEQ ID NO: 50255 - DNA, 22 bp, synthetic construct
  misc_feature 1..22: note = Probe
  source 1..22: mol_type = other DNA
tagccccaaacccactccacct

SEQ ID NO: 50256 - DNA, 16 bp, synthetic construct
  misc_feature 1..16: note = Probe
  source 1..16: mol_type = other DNA
tagcctttctattagc

SEQ ID NO: 50257 - DNA, 50 bp, synthetic construct
  misc_feature 1..50: note = Probe
  source 1..50: mol_type = other DNA
tagcgcgttcggctgttaaccgaaaggttggtggttcgagcccacccagg

SEQ ID NO: 50258 - DNA, 26 bp, synthetic construct
  misc_feature 1..26: note = Probe
  source 1..26: mol_type = other DNA
tagctcagtcggtagagcatcagact

SEQ ID NO: 50259 - DNA, 26 bp, synthetic construct
  misc_feature 1..26: note = Probe
  source 1..26: mol_type = other DNA
tagctcagtcggtagagcatgagact

SEQ ID NO: 50260 - DNA, 26 bp, synthetic construct
  misc_feature 1..26: note = Probe
  source 1..26: mol_type = other DNA
tagctcagtcggtagagcatgggact

SEQ ID NO: 50261 - DNA, 31 bp, synthetic construct
  misc_feature 1..31: note = Probe
  source 1..31: mol_type = other DNA
tagctgttaactaagtgtttgtgggtttaag

SEQ ID NO: 50262 - DNA, 39 bp, synthetic construct
  misc_feature 1..39: note = Probe
  source 1..39: mol_type = other DNA
tagctgttaactaagtgtttgtgggtttaagtcccattg

SEQ ID NO: 50263 - DNA, 43 bp, synthetic construct
  misc_feature 1..43: note = Probe
  source 1..43: mol_type = other DNA
tagctgttaactaagtgtttgtgggtttaagtcccattggtct

SEQ ID NO: 50264 - DNA, 50 bp, synthetic construct; identical to SEQ ID NO: 7568
  misc_feature 1..50: note = Probe
  source 1..50: mol_type = other DNA

SEQ ID NO: 50265 - DNA, 20 bp, synthetic construct
  misc_feature 1..20: note = Probe
  source 1..20: mol_type = other DNA
taggagatttcaacttaact

SEQ ID NO: 50266 - DNA, 25 bp, synthetic construct
  misc_feature 1..25: note = Probe
  source 1..25: mol_type = other DNA
taggagatttcaacttaacttgacc

SEQ ID NO: 50267 - DNA, 26 bp, synthetic construct
  misc_feature 1..26: note = Probe
  source 1..26: mol_type = other DNA
taggagatttcaacttaacttgaccg

SEQ ID NO: 50268 - DNA, 27 bp, synthetic construct
  misc_feature 1..27: note = Probe
  source 1..27: mol_type = other DNA
taggagatttcaacttaacttgaccgc

SEQ ID NO: 50269 - DNA, 28 bp, synthetic construct
  misc_feature 1..28: note = Probe
  source 1..28: mol_type = other DNA
taggagatttcaacttaacttgaccgct

SEQ ID NO: 50270 - DNA, 29 bp, synthetic construct
  misc_feature 1..29: note = Probe
  source 1..29: mol_type = other DNA
taggagatttcaacttaacttgaccgctc

SEQ ID NO: 50271 - DNA, 30 bp, synthetic construct; identical to SEQ ID NO: 11700
  misc_feature 1..30: note = Probe
  source 1..30: mol_type = other DNA

SEQ ID NO: 50272 - DNA, 31 bp, synthetic construct; identical to SEQ ID NO: 7575
  misc_feature 1..31: note = Probe
  source 1..31: mol_type = other DNA

SEQ ID NO: 50273 - DNA, 32 bp, synthetic construct; identical to SEQ ID NO: 7576
  misc_feature 1..32: note = Probe
  source 1..32: mol_type = other DNA

SEQ ID NO: 50274 - DNA, 33 bp, synthetic construct; identical to SEQ ID NO: 7577
  misc_feature 1..33: note = Probe
  source 1..33: mol_type = other DNA

SEQ ID NO: 50275 - DNA, 34 bp, synthetic construct; identical to SEQ ID NO: 7578
  misc_feature 1..34: note = Probe
  source 1..34: mol_type = other DNA

SEQ ID NO: 50276 - DNA, 35 bp, synthetic construct; identical to SEQ ID NO: 7579
  misc_feature 1..35: note = Probe
  source 1..35: mol_type = other DNA

SEQ ID NO: 50277 - DNA, 21 bp, synthetic construct
  misc_feature 1..21: note = Probe
  source 1..21: mol_type = other DNA
taggatggggtgtgataggtg

SEQ ID NO: 50278 - DNA, 22 bp, synthetic construct
  misc_feature 1..22: note = Probe
  source 1..22: mol_type = other DNA
taggatggggtgtgataggtgg

SEQ ID NO: 50279 - DNA, 26 bp, synthetic construct
  misc_feature 1..26: note = Probe
  source 1..26: mol_type = other DNA
taggatggggtgtgataggtggcacg

SEQ ID NO: 50280 - DNA, 28 bp, synthetic construct
  misc_feature 1..28: note = Probe
  source 1..28: mol_type = other DNA
taggatggggtgtgataggtggcacgga

SEQ ID NO: 50281 - DNA, 31 bp, synthetic construct; identical to SEQ ID NO: 7585
  misc_feature 1..31: note = Probe
  source 1..31: mol_type = other DNA

SEQ ID NO: 50282 - DNA, 32 bp, synthetic construct; identical to SEQ ID NO: 1593
  misc_feature 1..32: note = Probe
  source 1..32: mol_type = other DNA

SEQ ID NO: 50283 - DNA, 33 bp, synthetic construct; identical to SEQ ID NO: 1594
  misc_feature 1..33: note = Probe
  source 1..33: mol_type = other DNA

SEQ ID NO: 50284 - DNA, 34 bp, synthetic construct; identical to SEQ ID NO: 7586
  misc_feature 1..34: note = Probe
  source 1..34: mol_type = other DNA

SEQ ID NO: 50285 - DNA, 35 bp, synthetic construct; identical to SEQ ID NO: 7587
  misc_feature 1..35: note = Probe
  source 1..35: mol_type = other DNA

SEQ ID NO: 50286 - DNA, 36 bp, synthetic construct; identical to SEQ ID NO: 1595
  misc_feature 1..36: note = Probe
  source 1..36: mol_type = other DNA

SEQ ID NO: 50287 - DNA, 37 bp, synthetic construct; identical to SEQ ID NO: 7588
  misc_feature 1..37: note = Probe
  source 1..37: mol_type = other DNA

SEQ ID NO: 50288 - DNA, 49 bp, synthetic construct; identical to SEQ ID NO: 23495
  misc_feature 1..49: note = Probe
  source 1..49: mol_type = other DNA

SEQ ID NO: 50289 - DNA, 50 bp, synthetic construct; identical to SEQ ID NO: 23496
  misc_feature 1..50: note = Probe
  source 1..50: mol_type = other DNA

SEQ ID NO: 50290 - DNA, 17 bp, synthetic construct
  misc_feature 1..17: note = Probe
  source 1..17: mol_type = other DNA
taggggtatgattctcg

SEQ ID NO: 50291 - DNA, 18 bp, synthetic construct
  misc_feature 1..18: note = Probe
  source 1..18: mol_type = other DNA
taggggtatgattctcgc

SEQ ID NO: 50292 - DNA, 48 bp, synthetic construct
  misc_feature 1..48: note = Probe
  source 1..48: mol_type = other DNA
tagggtgcttagctgttaactaagtgtttgtgggtttaagtcccattg

SEQ ID NO: 50293 - DNA, 49 bp, synthetic construct; identical to SEQ ID NO: 7591
  misc_feature 1..49: note = Probe
  source 1..49: mol_type = other DNA

SEQ ID NO: 50294 - DNA, 44 bp, synthetic construct; identical to SEQ ID NO: 7592
  misc_feature 1..44: note = Probe
  source 1..44: mol_type = other DNA

SEQ ID NO: 50295 - DNA, 38 bp, synthetic construct; identical to SEQ ID NO: 23511
  misc_feature 1..38: note = Probe
  source 1..38: mol_type = other DNA

SEQ ID NO: 50296 - DNA, 44 bp, synthetic construct; identical to SEQ ID NO: 7593
  misc_feature 1..44: note = Probe
  source 1..44: mol_type = other DNA

SEQ ID NO: 50297 - DNA, 35 bp, synthetic construct; identical to SEQ ID NO: 1597
  misc_feature 1..35: note = Probe
  source 1..35: mol_type = other DNA

SEQ ID NO: 50298 - DNA, 36 bp, synthetic construct; identical to SEQ ID NO: 23513
  misc_feature 1..36: note = Probe
  source 1..36: mol_type = other DNA

SEQ ID NO: 50299 - DNA, 38 bp, synthetic construct; identical to SEQ ID NO: 7595
  misc_feature 1..38: note = Probe
  source 1..38: mol_type = other DNA

SEQ ID NO: 50300 - DNA, 50 bp, synthetic construct; identical to SEQ ID NO: 7598
  misc_feature 1..50: note = Probe
  source 1..50: mol_type = other DNA

SEQ ID NO: 50301 - DNA, 20 bp, synthetic construct
  misc_feature 1..20: note = Probe
  source 1..20: mol_type = other DNA
tagtccgtgcgagaataatg

SEQ ID NO: 50302 - DNA, 16 bp, synthetic construct
  misc_feature 1..16: note = Probe
  source 1..16: mol_type = other DNA
tagtggtgagtatccc

SEQ ID NO: 50303 - DNA, 18 bp, synthetic construct
  misc_feature 1..18: note = Probe
  source 1..18: mol_type = other DNA
tagtggtgagtatccccg

SEQ ID NO: 50304 - DNA, 19 bp, synthetic construct
  misc_feature 1..19: note = Probe
  source 1..19: mol_type = other DNA
tagtggtgagtatccccgc

SEQ ID NO: 50305 - DNA, 24 bp, synthetic construct
  misc_feature 1..24: note = Probe
  source 1..24: mol_type = other DNA
tagtggtgagtatccccgcctgtc

SEQ ID NO: 50306 - DNA, 25 bp, synthetic construct
  misc_feature 1..25: note = Probe
  source 1..25: mol_type = other DNA
tagtggtgagtatccccgcctgtca

SEQ ID NO: 50307 - DNA, 20 bp, synthetic construct
  misc_feature 1..20: note = Probe
  source 1..20: mol_type = other DNA
tagtggttaggattcggcgc

SEQ ID NO: 50308 - DNA, 21 bp, synthetic construct
  misc_feature 1..21: note = Probe
  source 1..21: mol_type = other DNA
tagtggttaggattcggcgct

SEQ ID NO: 50309 - DNA, 17 bp, synthetic construct
  misc_feature 1..17: note = Probe
  source 1..17: mol_type = other DNA
tagtggttagtactctg

SEQ ID NO: 50310 - DNA, 20 bp, synthetic construct
  misc_feature 1..20: note = Probe
  source 1..20: mol_type = other DNA
tagtggttagtactctgcgt

SEQ ID NO: 50311 - DNA, 23 bp, synthetic construct
  misc_feature 1..23: note = Probe
  source 1..23: mol_type = other DNA
tagtggttagtactctgcgttgt

SEQ ID NO: 50312 - DNA, 19 bp, synthetic construct
  misc_feature 1..19: note = Probe
  source 1..19: mol_type = other DNA
tagtggttagtatccccgc

SEQ ID NO: 50313 - DNA, 16 bp, synthetic construct
  misc_feature 1..16: note = Probe
  source 1..16: mol_type = other DNA
tatacccacacccacc

SEQ ID NO: 50314 - DNA, 17 bp, synthetic construct
  misc_feature 1..17: note = Probe
  source 1..17: mol_type = other DNA
tatacccacacccaccc

SEQ ID NO: 50315 - DNA, 18 bp, synthetic construct
  misc_feature 1..18: note = Probe
  source 1..18: mol_type = other DNA
tatacccacacccaccca

SEQ ID NO: 50316 - DNA, 19 bp, synthetic construct
  misc_feature 1..19: note = Probe
  source 1..19: mol_type = other DNA
tatacccacacccacccaa

SEQ ID NO: 50317 - DNA, 20 bp, synthetic construct
  misc_feature 1..20: note = Probe
  source 1..20: mol_type = other DNA
tatacccacacccacccaag

SEQ ID NO: 50318 - DNA, 21 bp, synthetic construct
  misc_feature 1..21: note = Probe
  source 1..21: mol_type = other DNA
tatacccacacccacccaaga

SEQ ID NO: 50319 - DNA, 22 bp, synthetic construct
  misc_feature 1..22: note = Probe
  source 1..22: mol_type = other DNA
tatacccacacccacccaagaa

SEQ ID NO: 50320 - DNA, 23 bp, synthetic construct
  misc_feature 1..23: note = Probe
  source 1..23: mol_type = other DNA
tatacccacacccacccaagaac

SEQ ID NO: 50321 - DNA, 24 bp, synthetic construct
  misc_feature 1..24: note = Probe
  source 1..24: mol_type = other DNA
tatacccacacccacccaagaaca

SEQ ID NO: 50322 - DNA, 25 bp, synthetic construct
  misc_feature 1..25: note = Probe
  source 1..25: mol_type = other DNA
tatacccacacccacccaagaacag

SEQ ID NO: 50323 - DNA, 26 bp, synthetic construct
  misc_feature 1..26: note = Probe
  source 1..26: mol_type = other DNA
tatacccacacccacccaagaacagg

SEQ ID NO: 50324 - DNA, 27 bp, synthetic construct
  misc_feature 1..27: note = Probe
  source 1..27: mol_type = other DNA
tatacccacacccacccaagaacaggg

SEQ ID NO: 50325 - DNA, 28 bp, synthetic construct
  misc_feature 1..28: note = Probe
  source 1..28: mol_type = other DNA
tatacccacacccacccaagaacagggt

SEQ ID NO: 50326 - DNA, 29 bp, synthetic construct
  misc_feature 1..29: note = Probe
  source 1..29: mol_type = other DNA
tatacccacacccacccaagaacagggtt

SEQ ID NO: 50327 - DNA, 30 bp, synthetic construct; identical to SEQ ID NO: 7623
  misc_feature 1..30: note = Probe
  source 1..30: mol_type = other DNA

SEQ ID NO: 50328 - DNA, 31 bp, synthetic construct; identical to SEQ ID NO: 7624
  misc_feature 1..31: note = Probe
  source 1..31: mol_type = other DNA

SEQ ID NO: 50329 - DNA, 32 bp, synthetic construct; identical to SEQ ID NO: 7625
  misc_feature 1..32: note = Probe
  source 1..32: mol_type = other DNA

SEQ ID NO: 50330 - DNA, 33 bp, synthetic construct; identical to SEQ ID NO: 7626
  misc_feature 1..33: note = Probe
  source 1..33: mol_type = other DNA

SEQ ID NO: 50331 - DNA, 34 bp, synthetic construct; identical to SEQ ID NO: 7627
  misc_feature 1..34: note = Probe
  source 1..34: mol_type = other DNA

SEQ ID NO: 50332 - DNA, 35 bp, synthetic construct; identical to SEQ ID NO: 7628
  misc_feature 1..35: note = Probe
  source 1..35: mol_type = other DNA

SEQ ID NO: 50333 - DNA, 36 bp, synthetic construct; identical to SEQ ID NO: 7629
  misc_feature 1..36: note = Probe
  source 1..36: mol_type = other DNA

SEQ ID NO: 50334 - DNA, 37 bp, synthetic construct; identical to SEQ ID NO: 7630
  misc_feature 1..37: note = Probe
  source 1..37: mol_type = other DNA

SEQ ID NO: 50335 - DNA, 38 bp, synthetic construct; identical to SEQ ID NO: 23596
  misc_feature 1..38: note = Probe
  source 1..38: mol_type = other DNA

SEQ ID NO: 50336 - DNA, 39 bp, synthetic construct; identical to SEQ ID NO: 7631
  misc_feature 1..39: note = Probe
  source 1..39: mol_type = other DNA

SEQ ID NO: 50337 - DNA, 40 bp, synthetic construct; identical to SEQ ID NO: 7632
  misc_feature 1..40: note = Probe
  source 1..40: mol_type = other DNA

SEQ ID NO: 50338 - DNA, 25 bp, synthetic construct
  misc_feature 1..25: note = Probe
  source 1..25: mol_type = other DNA
tatagtggttagtactctgcgttgt

SEQ ID NO: 50339 - DNA, 23 bp, synthetic construct
  misc_feature 1..23: note = Probe
  source 1..23: mol_type = other DNA
tatcattggtcgtggttgtagtc

SEQ ID NO: 50340 - DNA, 24 bp, synthetic construct
  misc_feature 1..24: note = Probe
  source 1..24: mol_type = other DNA
tatcattggtcgtggttgtagtcc

SEQ ID NO: 50341 - DNA, 33 bp, synthetic construct; identical to SEQ ID NO: 23606
  misc_feature 1..33: note = Probe
  source 1..33: mol_type = other DNA

SEQ ID NO: 50342 - DNA, 38 bp, synthetic construct; identical to SEQ ID NO: 7637
  misc_feature 1..38: note = Probe
  source 1..38: mol_type = other DNA

SEQ ID NO: 50343 - DNA, 46 bp, synthetic construct
  misc_feature 1..46: note = Probe
  source 1..46: mol_type = other DNA
tatccattggtcttaggccccaaaaattttggtgcaactccaaata

SEQ ID NO: 50344 - DNA, 37 bp, synthetic construct; identical to SEQ ID NO: 23610
  misc_feature 1..37: note = Probe
  source 1..37: mol_type = other DNA

SEQ ID NO: 50345 - DNA, 24 bp, synthetic construct
  misc_feature 1..24: note = Probe
  source 1..24: mol_type = other DNA
tatgataatcatatttaccaaatg

SEQ ID NO: 50346 - DNA, 32 bp, synthetic construct
  misc_feature 1..32: note = Probe
  source 1..32: mol_type = other DNA
tcaaaggttccgggttcgagtcccggcggagt

SEQ ID NO: 50347 - DNA, 27 bp, synthetic construct
  misc_feature 1..27: note = Probe
  source 1..27: mol_type = other DNA
tcaaagttaaattataggctaaatcct

SEQ ID NO: 50348 - DNA, 30 bp, synthetic construct; identical to SEQ ID NO: 7641
  misc_feature 1..30: note = Probe
  source 1..30: mol_type = other DNA

SEQ ID NO: 50349 - DNA, 31 bp, synthetic construct; identical to SEQ ID NO: 7642
  misc_feature 1..31: note = Probe
  source 1..31: mol_type = other DNA

SEQ ID NO: 50350 - DNA, 32 bp, synthetic construct; identical to SEQ ID NO: 7643
  misc_feature 1..32: note = Probe
  source 1..32: mol_type = other DNA

SEQ ID NO: 50351 - DNA, 33 bp, synthetic construct; identical to SEQ ID NO: 23623
  misc_feature 1..33: note = Probe
  source 1..33: mol_type = other DNA

SEQ ID NO: 50352 - DNA, 34 bp, synthetic construct; identical to SEQ ID NO: 23624
  misc_feature 1..34: note = Probe
  source 1..34: mol_type = other DNA

SEQ ID NO: 50353 - DNA, 35 bp, synthetic construct; identical to SEQ ID NO: 23625
  misc_feature 1..35: note = Probe
  source 1..35: mol_type = other DNA

SEQ ID NO: 50354 - DNA, 36 bp, synthetic construct; identical to SEQ ID NO: 23626
  misc_feature 1..36: note = Probe
  source 1..36: mol_type = other DNA

SEQ ID NO: 50355 - DNA, 38 bp, synthetic construct; identical to SEQ ID NO: 23628
  misc_feature 1..38: note = Probe
  source 1..38: mol_type = other DNA

SEQ ID NO: 50356 - DNA, 39 bp, synthetic construct; identical to SEQ ID NO: 23629
  misc_feature 1..39: note = Probe
  source 1..39: mol_type = other DNA

SEQ ID NO: 50357 - DNA, 40 bp, synthetic construct; identical to SEQ ID NO: 23630
  misc_feature 1..40: note = Probe
  source 1..40: mol_type = other DNA

SEQ ID NO: 50358 - DNA, 42 bp, synthetic construct; identical to SEQ ID NO: 23631
  misc_feature 1..42: note = Probe
  source 1..42: mol_type = other DNA

SEQ ID NO: 50359 - DNA, 19 bp, synthetic construct
  misc_feature 1..19: note = Probe
  source 1..19: mol_type = other DNA
tcaaatcccggacgagccc

SEQ ID NO: 50360 - DNA, 20 bp, synthetic construct
  misc_feature 1..20: note = Probe
  source 1..20: mol_type = other DNA
tcaaatcccggacgagcccc

SEQ ID NO: 50361 - DNA, 21 bp, synthetic construct
  misc_feature 1..21: note = Probe
  source 1..21: mol_type = other DNA
tcaaatcccggacgagccccc

SEQ ID NO: 50362 - DNA, 22 bp, synthetic construct
  misc_feature 1..22: note = Probe
  source 1..22: mol_type = other DNA
tcaaatcccggacgagccccct

SEQ ID NO: 50363 - DNA, 22 bp, synthetic construct
  misc_feature 1..22: note = Probe
  source 1..22: mol_type = other DNA
tcaaatccgggtgccccctcaa

SEQ ID NO: 50364 - DNA, 19 bp, synthetic construct
  misc_feature 1..19: note = Probe
  source 1..19: mol_type = other DNA
tcaaatctcggtgggacct

SEQ ID NO: 50365 - DNA, 24 bp, synthetic construct
  misc_feature 1..24: note = Probe
  source 1..24: mol_type = other DNA
tcaacttaacttgaccgctctgag

SEQ ID NO: 50366 - DNA, 25 bp, synthetic construct
  misc_feature 1..25: note = Probe
  source 1..25: mol_type = other DNA
tcaacttaacttgaccgctctgagc

SEQ ID NO: 50367 - DNA, 26 bp, synthetic construct
  misc_feature 1..26: note = Probe
  source 1..26: mol_type = other DNA
tcaacttaacttgaccgctctgagct

SEQ ID NO: 50368 - DNA, 22 bp, synthetic construct
  misc_feature 1..22: note = Probe
  source 1..22: mol_type = other DNA
tcaagtccctgttcgggcggca

SEQ ID NO: 50369 - DNA, 22 bp, synthetic construct
  misc_feature 1..22: note = Probe
  source 1..22: mol_type = other DNA
tcaattccccgacggggaggtg

SEQ ID NO: 50370 - DNA, 22 bp, synthetic construct
  misc_feature 1..22: note = Probe
  source 1..22: mol_type = other DNA
tcaattcccggtcagggaacca

SEQ ID NO: 50371 - DNA, 19 bp, synthetic construct
  misc_feature 1..19: note = Probe
  source 1..19: mol_type = other DNA
tcacaagaactgctaactc

SEQ ID NO: 50372 - DNA, 20 bp, synthetic construct
  misc_feature 1..20: note = Probe
  source 1..20: mol_type = other DNA
tcacaagaactgctaactca

SEQ ID NO: 50373 - DNA, 22 bp, synthetic construct
  misc_feature 1..22: note = Probe
  source 1..22: mol_type = other DNA
tcacaagaactgctaactcatg

SEQ ID NO: 50374 - DNA, 49 bp, synthetic construct; identical to SEQ ID NO: 1609
  misc_feature 1..49: note = Probe
  source 1..49: mol_type = other DNA

SEQ ID NO: 50375 - DNA, 19 bp, synthetic construct
  misc_feature 1..19: note = Probe
  source 1..19: mol_type = other DNA
tcacacgcgaaaggtcccc

SEQ ID NO: 50376 - DNA, 41 bp, synthetic construct
  misc_feature 1..41: note = Probe
  source 1..41: mol_type = other DNA
tcacacgcgaaaggtccccggttcgaaaccgggcggaaaca

SEQ ID NO: 50377 - DNA, 21 bp, synthetic construct
  misc_feature 1..21: note = Probe
  source 1..21: mol_type = other DNA
tcacacggggcacaataattt

SEQ ID NO: 50378 - DNA, 16 bp, synthetic construct
  misc_feature 1..16: note = Probe
  source 1..16: mol_type = other DNA
tcacatcaccccataa

SEQ ID NO: 50379 - DNA, 17 bp, synthetic construct
  misc_feature 1..17: note = Probe
  source 1..17: mol_type = other DNA
tcacatcaccccataaa

SEQ ID NO: 50380 - DNA, 18 bp, synthetic construct
  misc_feature 1..18: note = Probe
  source 1..18: mol_type = other DNA
tcacatcaccccataaac

SEQ ID NO: 50381 - DNA, 19 bp, synthetic construct
  misc_feature 1..19: note = Probe
  source 1..19: mol_type = other DNA
tcacatcaccccataaaca

SEQ ID NO: 50382 - DNA, 20 bp, synthetic construct
  misc_feature 1..20: note = Probe
  source 1..20: mol_type = other DNA
tcacatcaccccataaacaa

SEQ ID NO: 50383 - DNA, 21 bp, synthetic construct
  misc_feature 1..21: note = Probe
  source 1..21: mol_type = other DNA
tcacatcaccccataaacaaa

SEQ ID NO: 50384 - DNA, 22 bp, synthetic construct
  misc_feature 1..22: note = Probe
  source 1..22: mol_type = other DNA
tcacatcaccccataaacaaat

SEQ ID NO: 50385 - DNA, 38 bp, synthetic construct; identical to SEQ ID NO: 41697
  misc_feature 1..38: note = Probe
  source 1..38: mol_type = other DNA

SEQ ID NO: 50386 - DNA, 41 bp, synthetic construct; identical to SEQ ID NO: 7674
  misc_feature 1..41: note = Probe
  source 1..41: mol_type = other DNA

SEQ ID NO: 50387 - DNA, 41 bp, synthetic construct; identical to SEQ ID NO: 7677
  misc_feature 1..41: note = Probe
  source 1..41: mol_type = other DNA

SEQ ID NO: 50388 - DNA, 41 bp, synthetic construct; identical to SEQ ID NO: 7682
  misc_feature 1..41: note = Probe
  source 1..41: mol_type = other DNA

SEQ ID NO: 50389 - DNA, 18 bp, synthetic construct
  misc_feature 1..18: note = Probe
  source 1..18: mol_type = other DNA
tcacgcgggagaccgggg

SEQ ID NO: 50390 - DNA, 19 bp, synthetic construct
  misc_feature 1..19: note = Probe
  source 1..19: mol_type = other DNA
tcacgcgggagaccggggt

SEQ ID NO: 50391 - DNA, 21 bp, synthetic construct
  misc_feature 1..21: note = Probe
  source 1..21: mol_type = other DNA
tcacgcgggagaccggggttc

SEQ ID NO: 50392 - DNA, 33 bp, synthetic construct; identical to SEQ ID NO: 1614
  misc_feature 1..33: note = Probe
  source 1..33: mol_type = other DNA

SEQ ID NO: 50393 - DNA, 35 bp, synthetic construct; identical to SEQ ID NO: 7687
  misc_feature 1..35: note = Probe
  source 1..35: mol_type = other DNA

SEQ ID NO: 50394 - DNA, 39 bp, synthetic construct; identical to SEQ ID NO: 7689
  misc_feature 1..39: note = Probe
  source 1..39: mol_type = other DNA

SEQ ID NO: 50395 - DNA, 40 bp, synthetic construct; identical to SEQ ID NO: 7690
  misc_feature 1..40: note = Probe
  source 1..40: mol_type = other DNA

SEQ ID NO: 50396 - DNA, 41 bp, synthetic construct; identical to SEQ ID NO: 7691
  misc_feature 1..41: note = Probe
  source 1..41: mol_type = other DNA

SEQ ID NO: 50397 - DNA, 42 bp, synthetic construct; identical to SEQ ID NO: 7692
  misc_feature 1..42: note = Probe
  source 1..42: mol_type = other DNA

SEQ ID NO: 50398 - DNA, 50 bp, synthetic construct
  misc_feature 1..50: note = Probe
  source 1..50: mol_type = other DNA
tcacgcgggagaccggggttcaattccccgacggggaggtgtgtagctgc

SEQ ID NO: 50399 - DNA, 23 bp, synthetic construct
  misc_feature 1..23: note = Probe
  source 1..23: mol_type = other DNA
tcacgcgggagaccggggttcga

SEQ ID NO: 50400 - DNA, 24 bp, synthetic construct
  misc_feature 1..24: note = Probe
  source 1..24: mol_type = other DNA
tcacgcgggagaccggggttcgat

SEQ ID NO: 50401 - DNA, 31 bp, synthetic construct; identical to SEQ ID NO: 7697
  misc_feature 1..31: note = Probe
  source 1..31: mol_type = other DNA

SEQ ID NO: 50402 - DNA, 32 bp, synthetic construct; identical to SEQ ID NO: 1618
  misc_feature 1..32: note = Probe
  source 1..32: mol_type = other DNA

SEQ ID NO: 50403 - DNA, 39 bp, synthetic construct; identical to SEQ ID NO: 7699
  misc_feature 1..39: note = Probe
  source 1..39: mol_type = other DNA

SEQ ID NO: 50404 - DNA, 40 bp, synthetic construct; identical to SEQ ID NO: 7700
  misc_feature 1..40: note = Probe
  source 1..40: mol_type = other DNA

SEQ ID NO: 50405 - DNA, 41 bp, synthetic construct; identical to SEQ ID NO: 7701
  misc_feature 1..41: note = Probe
  source 1..41: mol_type = other DNA

SEQ ID NO: 50406 - DNA, 42 bp, synthetic construct; identical to SEQ ID NO: 7702
  misc_feature 1..42: note = Probe
  source 1..42: mol_type = other DNA

SEQ ID NO: 50407 - DNA, 43 bp, synthetic construct; identical to SEQ ID NO: 7703
  misc_feature 1..43: note = Probe
  source 1..43: mol_type = other DNA

SEQ ID NO: 50408 - DNA, 49 bp, synthetic construct; identical to SEQ ID NO: 7704
  misc_feature 1..49: note = Probe
  source 1..49: mol_type = other DNA

SEQ ID NO: 50409 - DNA, 50 bp, synthetic construct; identical to SEQ ID NO: 7705
  misc_feature 1..50: note = Probe
  source 1..50: mol_type = other DNA

SEQ ID NO: 50410 - DNA, 40 bp, synthetic construct; identical to SEQ ID NO: 7706
  misc_feature 1..40: note = Probe
  source 1..40: mol_type = other DNA

SEQ ID NO: 50411 - DNA, 41 bp, synthetic construct; identical to SEQ ID NO: 7707
  misc_feature 1..41: note = Probe
  source 1..41: mol_type = other DNA

SEQ ID NO: 50412 - DNA, 42 bp, synthetic construct
  misc_feature 1..42: note = Probe
  source 1..42: mol_type = other DNA
tcacgcgggagaccggggttcgattccccgacggggagacga

SEQ ID NO: 50413 - DNA, 43 bp, synthetic construct
  misc_feature 1..43: note = Probe
  source 1..43: mol_type = other DNA
tcacgcgggagaccggggttcgattccccgacggggagacgaa

SEQ ID NO: 50414 - DNA, 40 bp, synthetic construct; identical to SEQ ID NO: 7708
  misc_feature 1..40: note = Probe
  source 1..40: mol_type = other DNA

SEQ ID NO: 50415 - DNA, 41 bp, synthetic construct; identical to SEQ ID NO: 7709
  misc_feature 1..41: note = Probe
  source 1..41: mol_type = other DNA

SEQ ID NO: 50416 - DNA, 42 bp, synthetic construct; identical to SEQ ID NO: 7710
  misc_feature 1..42: note = Probe
  source 1..42: mol_type = other DNA

SEQ ID NO: 50417 - DNA, 39 bp, synthetic construct; identical to SEQ ID NO: 7711
  misc_feature 1..39: note = Probe
  source 1..39: mol_type = other DNA

SEQ ID NO: 50418 - DNA, 40 bp, synthetic construct; identical to SEQ ID NO: 7712
  misc_feature 1..40: note = Probe
  source 1..40: mol_type = other DNA

SEQ ID NO: 50419 - DNA, 41 bp, synthetic construct
  misc_feature 1..41: note = Probe
  source 1..41: mol_type = other DNA
tcacgcgggagaccggggttcgattccccgacggggaggag

SEQ ID NO: 50420 - DNA, 43 bp, synthetic construct; identical to SEQ ID NO: 7714
  misc_feature 1..43: note = Probe
  source 1..43: mol_type = other DNA

SEQ ID NO: 50421 - DNA, 40 bp, synthetic construct; identical to SEQ ID NO: 7715
  misc_feature 1..40: note = Probe
  source 1..40: mol_type = other DNA

SEQ ID NO: 50422 - DNA, 41 bp, synthetic construct; identical to SEQ ID NO: 7716
  misc_feature 1..41: note = Probe
  source 1..41: mol_type = other DNA

SEQ ID NO: 50423 - DNA, 42 bp, synthetic construct; identical to SEQ ID NO: 7717
  misc_feature 1..42: note = Probe
  source 1..42: mol_type = other DNA

SEQ ID NO: 50424 - DNA, 49 bp, synthetic construct; identical to SEQ ID NO: 7719
  misc_feature 1..49: note = Probe
  source 1..49: mol_type = other DNA

SEQ ID NO: 50425 - DNA, 50 bp, synthetic construct; identical to SEQ ID NO: 7720
  misc_feature 1..50: note = Probe
  source 1..50: mol_type = other DNA

SEQ ID NO: 50426 - DNA, 42 bp, synthetic construct; identical to SEQ ID NO: 7721
  misc_feature 1..42: note = Probe
  source 1..42: mol_type = other DNA

SEQ ID NO: 50427 - DNA, 43 bp, synthetic construct
  misc_feature 1..43: note = Probe
  source 1..43: mol_type = other DNA
tcacgcgggagaccggggttcgattccccgacggggaggcagc

SEQ ID NO: 50428 - DNA, 44 bp, synthetic construct; identical to SEQ ID NO: 7722
  misc_feature 1..44: note = Probe
  source 1..44: mol_type = other DNA

SEQ ID NO: 50429 - DNA, 41 bp, synthetic construct; identical to SEQ ID NO: 7723
  misc_feature 1..41: note = Probe
  source 1..41: mol_type = other DNA

SEQ ID NO: 50430 - DNA, 42 bp, synthetic construct
  misc_feature 1..42: note = Probe
  source 1..42: mol_type = other DNA
tcacgcgggagaccggggttcgattccccgacggggaggcca

SEQ ID NO: 50431 - DNA, 43 bp, synthetic construct
  misc_feature 1..43: note = Probe
  source 1..43: mol_type = other DNA
tcacgcgggagaccggggttcgattccccgacggggaggccaa

SEQ ID NO: 50432 - DNA, 50 bp, synthetic construct; identical to SEQ ID NO: 41724
  misc_feature 1..50: note = Probe
  source 1..50: mol_type = other DNA

SEQ ID NO: 50433 - DNA, 42 bp, synthetic construct; identical to SEQ ID NO: 7724
  misc_feature 1..42: note = Probe
  source 1..42: mol_type = other DNA

SEQ ID NO: 50434 - DNA, 43 bp, synthetic construct; identical to SEQ ID NO: 7725
  misc_feature 1..43: note = Probe
  source 1..43: mol_type = other DNA

SEQ ID NO: 50435 - DNA, 44 bp, synthetic construct; identical to SEQ ID NO: 7726
  misc_feature 1..44: note = Probe
  source 1..44: mol_type = other DNA

SEQ ID NO: 50436 - DNA, 45 bp, synthetic construct; identical to SEQ ID NO: 7727
  misc_feature 1..45: note = Probe
  source 1..45: mol_type = other DNA

SEQ ID NO: 50437 - DNA, 50 bp, synthetic construct; identical to SEQ ID NO: 41725
  misc_feature 1..50: note = Probe
  source 1..50: mol_type = other DNA

SEQ ID NO: 50438 - DNA, 33 bp, synthetic construct; identical to SEQ ID NO: 7728
  misc_feature 1..33: note = Probe
  source 1..33: mol_type = other DNA

SEQ ID NO: 50439 - DNA, 33 bp, synthetic construct; identical to SEQ ID NO: 1624
  misc_feature 1..33: note = Probe
  source 1..33: mol_type = other DNA

SEQ ID NO: 50440 - DNA, 33 bp, synthetic construct; identical to SEQ ID NO: 23699
  misc_feature 1..33: note = Probe
  source 1..33: mol_type = other DNA

SEQ ID NO: 50441 - DNA, 35 bp, synthetic construct; identical to SEQ ID NO: 41729
  misc_feature 1..35: note = Probe
  source 1..35: mol_type = other DNA

SEQ ID NO: 50442 - DNA, 38 bp, synthetic construct; identical to SEQ ID NO: 23705
  misc_feature 1..38: note = Probe
  source 1..38: mol_type = other DNA

SEQ ID NO: 50443 - DNA, 50 bp, synthetic construct; identical to SEQ ID NO: 7731
  misc_feature 1..50: note = Probe
  source 1..50: mol_type = other DNA

SEQ ID NO: 50444 - DNA, 27 bp, synthetic construct
  misc_feature 1..27: note = Probe
  source 1..27: mol_type = other DNA
tcagctaaataagctatcgggcccata

SEQ ID NO: 50445 - DNA, 37 bp, synthetic construct; identical to SEQ ID NO: 7737
  misc_feature 1..37: note = Probe
  source 1..37: mol_type = other DNA

SEQ ID NO: 50446 - DNA, 28 bp, synthetic construct
  misc_feature 1..28: note = Probe
  source 1..28: mol_type = other DNA
tcagggatgggttcgattctcatagtcc

SEQ ID NO: 50447 - DNA, 32 bp, synthetic construct; identical to SEQ ID NO: 23722
  misc_feature 1..32: note = Probe
  source 1..32: mol_type = other DNA

SEQ ID NO: 50448 - DNA, 33 bp, synthetic construct
  misc_feature 1..33: note = Probe
  source 1..33: mol_type = other DNA
tcagggtcgtgggttcgagccccacgttgggcg

SEQ ID NO: 50449 - DNA, 20 bp, synthetic construct
  misc_feature 1..20: note = Probe
  source 1..20: mol_type = other DNA
tcagtggtagaattctcgcc

SEQ ID NO: 50450 - DNA, 37 bp, synthetic construct; identical to SEQ ID NO: 7747
  misc_feature 1..37: note = Probe
  source 1..37: mol_type = other DNA

SEQ ID NO: 50451 - DNA, 29 bp, synthetic construct
  misc_feature 1..29: note = Probe
  source 1..29: mol_type = other DNA
tcatattgaattgcaaattcgaagaagca

SEQ ID NO: 50452 - DNA, 50 bp, synthetic construct; identical to SEQ ID NO: 7753
  misc_feature 1..50: note = Probe
  source 1..50: mol_type = other DNA

SEQ ID NO: 50453 - DNA, 50 bp, synthetic construct
  misc_feature 1..50: note = Probe
  source 1..50: mol_type = other DNA
tcatgcaagattcccattcttgcgacccgggttcgattcccgggcggcgc

SEQ ID NO: 50454 - DNA, 27 bp, synthetic construct
  misc_feature 1..27: note = Probe
  source 1..27: mol_type = other DNA
tcatgcccccatgtctaacaacatggc

SEQ ID NO: 50455 - DNA, 28 bp, synthetic construct
  misc_feature 1..28: note = Probe
  source 1..28: mol_type = other DNA
tcatgcccccatgtctaacaacatggct

SEQ ID NO: 50456 - DNA, 29 bp, synthetic construct
  misc_feature 1..29: note = Probe
  source 1..29: mol_type = other DNA
tcatgcccccatgtctaacaacatggctt

SEQ ID NO: 50457 - DNA, 30 bp, synthetic construct; identical to SEQ ID NO: 7761
  misc_feature 1..30: note = Probe
  source 1..30: mol_type = other DNA

SEQ ID NO: 50458 - DNA, 31 bp, synthetic construct; identical to SEQ ID NO: 7762
  misc_feature 1..31: note = Probe
  source 1..31: mol_type = other DNA

SEQ ID NO: 50459 - DNA, 32 bp, synthetic construct; identical to SEQ ID NO: 7763
  misc_feature 1..32: note = Probe
  source 1..32: mol_type = other DNA

SEQ ID NO: 50460 - DNA, 33 bp, synthetic construct; identical to SEQ ID NO: 7764
  misc_feature 1..33: note = Probe
  source 1..33: mol_type = other DNA

SEQ ID NO: 50461 - DNA, 34 bp, synthetic construct; identical to SEQ ID NO: 7765
  misc_feature 1..34: note = Probe
  source 1..34: mol_type = other DNA

SEQ ID NO: 50462 - DNA, 36 bp, synthetic construct; identical to SEQ ID NO: 7767
  misc_feature 1..36: note = Probe
  source 1..36: mol_type = other DNA

SEQ ID NO: 50463 - DNA, 37 bp, synthetic construct; identical to SEQ ID NO: 7768
  misc_feature 1..37: note = Probe
  source 1..37: mol_type = other DNA

SEQ ID NO: 50464 - DNA, 33 bp, synthetic construct; identical to SEQ ID NO: 7769
  misc_feature 1..33: note = Probe
  source 1..33: mol_type = other DNA

SEQ ID NO: 50465 - DNA, 21 bp, synthetic construct
  misc_feature 1..21: note = Probe
  source 1..21: mol_type = other DNA
tcattggtcgtggttgtagtc

SEQ ID NO: 50466 - DNA, 22 bp, synthetic construct
  misc_feature 1..22: note = Probe
  source 1..22: mol_type = other DNA
tcattggtcgtggttgtagtcc

SEQ ID NO: 50467 - DNA, 26 bp, synthetic construct
  misc_feature 1..26: note = Probe
  source 1..26: mol_type = other DNA
tcattggtcgtggttgtagtccgtgc

SEQ ID NO: 50468 - DNA, 31 bp, synthetic construct; identical to SEQ ID NO: 23753
  misc_feature 1..31: note = Probe
  source 1..31: mol_type = other DNA

SEQ ID NO: 50469 - DNA, 32 bp, synthetic construct; identical to SEQ ID NO: 25723
  misc_feature 1..32: note = Probe
  source 1..32: mol_type = other DNA

SEQ ID NO: 50470 - DNA, 33 bp, synthetic construct; identical to SEQ ID NO: 7770
  misc_feature 1..33: note = Probe
  source 1..33: mol_type = other DNA

SEQ ID NO: 50471 - DNA, 42 bp, synthetic construct; identical to SEQ ID NO: 23758
  misc_feature 1..42: note = Probe
  source 1..42: mol_type = other DNA

SEQ ID NO: 50472 - DNA, 42 bp, synthetic construct; identical to SEQ ID NO: 23759
  misc_feature 1..42: note = Probe
  source 1..42: mol_type = other DNA

SEQ ID NO: 50473 - DNA, 22 bp, synthetic construct
  misc_feature 1..22: note = Probe
  source 1..22: mol_type = other DNA
tccaatgggggttccccgcgca

SEQ ID NO: 50474 - DNA, 25 bp, synthetic construct
  misc_feature 1..25: note = Probe
  source 1..25: mol_type = other DNA
tccaatgggggttccccgcgcaggt

SEQ ID NO: 50475 - DNA, 22 bp, synthetic construct
  misc_feature 1..22: note = Probe
  source 1..22: mol_type = other DNA
tccaatggggtctccccgcgca

SEQ ID NO: 50476 - DNA, 25 bp, synthetic construct
  misc_feature 1..25: note = Probe
  source 1..25: mol_type = other DNA
tccaatggggtctccccgcgcaggt

SEQ ID NO: 50477 - DNA, 22 bp, synthetic construct
  misc_feature 1..22: note = Probe
  source 1..22: mol_type = other DNA
tccaatggggtttccccgcaca

SEQ ID NO: 50478 - DNA, 25 bp, synthetic construct
  misc_feature 1..25: note = Probe
  source 1..25: mol_type = other DNA
tccaatggggtttccccgcacaggt

SEQ ID NO: 50479 - DNA, 21 bp, synthetic construct
  misc_feature 1..21: note = Probe
  source 1..21: mol_type = other DNA
tccaattaactagttttgaca

SEQ ID NO: 50480 - DNA, 39 bp, synthetic construct; identical to SEQ ID NO: 7775
  misc_feature 1..39: note = Probe
  source 1..39: mol_type = other DNA

SEQ ID NO: 50481 - DNA, 40 bp, synthetic construct; identical to SEQ ID NO: 7776
  misc_feature 1..40: note = Probe
  source 1..40: mol_type = other DNA

SEQ ID NO: 50482 - DNA, 41 bp, synthetic construct; identical to SEQ ID NO: 7777
  misc_feature 1..41: note = Probe
  source 1..41: mol_type = other DNA

SEQ ID NO: 50483 - DNA, 32 bp, synthetic construct; identical to SEQ ID NO: 7779
  misc_feature 1..32: note = Probe
  source 1..32: mol_type = other DNA

SEQ ID NO: 50484 - DNA, 33 bp, synthetic construct; identical to SEQ ID NO: 7780
  misc_feature 1..33: note = Probe
  source 1..33: mol_type = other DNA

SEQ ID NO: 50485 - DNA, 35 bp, synthetic construct; identical to SEQ ID NO: 23786
  misc_feature 1..35: note = Probe
  source 1..35: mol_type = other DNA

SEQ ID NO: 50486 - DNA, 36 bp, synthetic construct; identical to SEQ ID NO: 23787
  misc_feature 1..36: note = Probe
  source 1..36: mol_type = other DNA

SEQ ID NO: 50487 - DNA, 37 bp, synthetic construct; identical to SEQ ID NO: 7781
  misc_feature 1..37: note = Probe
  source 1..37: mol_type = other DNA

SEQ ID NO: 50488 - DNA, 35 bp, synthetic construct; identical to SEQ ID NO: 23789
  misc_feature 1..35: note = Probe
  source 1..35: mol_type = other DNA

SEQ ID NO: 50489 - DNA, 31 bp, synthetic construct; identical to SEQ ID NO: 23790
  misc_feature 1..31: note = Probe
  source 1..31: mol_type = other DNA

SEQ ID NO: 50490 - DNA, 32 bp, synthetic construct; identical to SEQ ID NO: 23791
  misc_feature 1..32: note = Probe
  source 1..32: mol_type = other DNA

SEQ ID NO: 50491 - DNA, 35 bp, synthetic construct; identical to SEQ ID NO: 7782
  misc_feature 1..35: note = Probe
  source 1..35: mol_type = other DNA

SEQ ID NO: 50492 - DNA, 37 bp, synthetic construct; identical to SEQ ID NO: 7783
  misc_feature 1..37: note = Probe
  source 1..37: mol_type = other DNA

SEQ ID NO: 50493 - DNA, 27 bp, synthetic construct
  misc_feature 1..27: note = Probe
  source 1..27: mol_type = other DNA
tccagggttcaagtccctgttcaggca

SEQ ID NO: 50494 - DNA, 26 bp, synthetic construct
  misc_feature 1..26: note = Probe
  source 1..26: mol_type = other DNA
tccagggttcaagtccctgttcgggc

SEQ ID NO: 50495 - DNA, 28 bp, synthetic construct
  misc_feature 1..28: note = Probe
  source 1..28: mol_type = other DNA
tccagggttcaagtccctgttcgggcgg

SEQ ID NO: 50496 - DNA, 28 bp, synthetic construct
  misc_feature 1..28: note = Probe
  source 1..28: mol_type = other DNA
tccagggttcaagtccctgttcgggcgt

SEQ ID NO: 50497 - DNA, 24 bp, synthetic construct
  misc_feature 1..24: note = Probe
  source 1..24: mol_type = other DNA
tccaggttcgactcctggctggct

SEQ ID NO: 50498 - DNA, 26 bp, synthetic construct
  misc_feature 1..26: note = Probe
  source 1..26: mol_type = other DNA
tccaggttcgactcctggctggctcg

SEQ ID NO: 50499 - DNA, 28 bp, synthetic construct
  misc_feature 1..28: note = Probe
  source 1..28: mol_type = other DNA
tccatagtgtagtggttatcacgtctgc

SEQ ID NO: 50500 - DNA, 25 bp, synthetic construct
  misc_feature 1..25: note = Probe
  source 1..25: mol_type = other DNA
tccattggggtctccccgcgcaggt

SEQ ID NO: 50501 - DNA, 21 bp, synthetic construct
  misc_feature 1..21: note = Probe
  source 1..21: mol_type = other DNA
tccattggggtttccccgcgc

SEQ ID NO: 50502 - DNA, 22 bp, synthetic construct
  misc_feature 1..22: note = Probe
  source 1..22: mol_type = other DNA
tccattggggtttccccgcgca

SEQ ID NO: 50503 - DNA, 26 bp, synthetic construct
  misc_feature 1..26: note = Probe
  source 1..26: mol_type = other DNA
tccattggggtttccccgcgcaggtt

SEQ ID NO: 50504 - DNA, 27 bp, synthetic construct
  misc_feature 1..27: note = Probe
  source 1..27: mol_type = other DNA
tccattggggtttccccgcgcaggttc

SEQ ID NO: 50505 - DNA, 44 bp, synthetic construct; identical to SEQ ID NO: 23813
  misc_feature 1..44: note = Probe
  source 1..44: mol_type = other DNA

SEQ ID NO: 50506 - DNA, 16 bp, synthetic construct
  misc_feature 1..16: note = Probe
  source 1..16: mol_type = other DNA
tcccacatggtctagc

SEQ ID NO: 50507 - DNA, 17 bp, synthetic construct
  misc_feature 1..17: note = Probe
  source 1..17: mol_type = other DNA
tcccacatggtctagcg

SEQ ID NO: 50508 - DNA, 20 bp, synthetic construct
  misc_feature 1..20: note = Probe
  source 1..20: mol_type = other DNA
tcccacatggtctagcggtt

SEQ ID NO: 50509 - DNA, 21 bp, synthetic construct
  misc_feature 1..21: note = Probe
  source 1..21: mol_type = other DNA
tcccacatggtctagcggtta

SEQ ID NO: 50510 - DNA, 25 bp, synthetic construct
  misc_feature 1..25: note = Probe
  source 1..25: mol_type = other DNA
tcccacatggtctagcggttaggat

SEQ ID NO: 50511 - DNA, 49 bp, synthetic construct; identical to SEQ ID NO: 7797
  misc_feature 1..49: note = Probe
  source 1..49: mol_type = other DNA

SEQ ID NO: 50512 - DNA, 33 bp, synthetic construct; identical to SEQ ID NO: 23829
  misc_feature 1..33: note = Probe
  source 1..33: mol_type = other DNA

SEQ ID NO: 50513 - DNA, 16 bp, synthetic construct
  misc_feature 1..16: note = Probe
  source 1..16: mol_type = other DNA
tcccatatggtctagc

SEQ ID NO: 50514 - DNA, 17 bp, synthetic construct
  misc_feature 1..17: note = Probe
  source 1..17: mol_type = other DNA
tcccatatggtctagcg

SEQ ID NO: 50515 - DNA, 22 bp, synthetic construct
  misc_feature 1..22: note = Probe
  source 1..22: mol_type = other DNA
tcccatatggtctagcggttag

SEQ ID NO: 50516 - DNA, 24 bp, synthetic construct
  misc_feature 1..24: note = Probe
  source 1..24: mol_type = other DNA
tcccatatggtctagcggttagga

SEQ ID NO: 50517 - DNA, 25 bp, synthetic construct
  misc_feature 1..25: note = Probe
  source 1..25: mol_type = other DNA
tcccatatggtctagcggttaggat

SEQ ID NO: 50518 - DNA, 28 bp, synthetic construct
  misc_feature 1..28: note = Probe
  source 1..28: mol_type = other DNA
tcccatatggtctagcggttaggattcc

SEQ ID NO: 50519 - DNA, 37 bp, synthetic construct; identical to SEQ ID NO: 1666
  misc_feature 1..37: note = Probe
  source 1..37: mol_type = other DNA

SEQ ID NO: 50520 - DNA, 39 bp, synthetic construct; identical to SEQ ID NO: 7803
  misc_feature 1..39: note = Probe
  source 1..39: mol_type = other DNA

SEQ ID NO: 50521 - DNA, 49 bp, synthetic construct; identical to SEQ ID NO: 23834
  misc_feature 1..49: note = Probe
  source 1..49: mol_type = other DNA

SEQ ID NO: 50522 - DNA, 50 bp, synthetic construct; identical to SEQ ID NO: 7805
  misc_feature 1..50: note = Probe
  source 1..50: mol_type = other DNA

SEQ ID NO: 50523 - DNA, 26 bp, synthetic construct
  misc_feature 1..26: note = Probe
  source 1..26: mol_type = other DNA
tcccatctggggtggcctgtgacttt

SEQ ID NO: 50524 - DNA, 30 bp, synthetic construct; identical to SEQ ID NO: 23838
  misc_feature 1..30: note = Probe
  source 1..30: mol_type = other DNA

SEQ ID NO: 50525 - DNA, 50 bp, synthetic construct; identical to SEQ ID NO: 7808
  misc_feature 1..50: note = Probe
  source 1..50: mol_type = other DNA

SEQ ID NO: 50526 - DNA, 50 bp, synthetic construct; identical to SEQ ID NO: 7809
  misc_feature 1..50: note = Probe
  source 1..50: mol_type = other DNA

SEQ ID NO: 50527 - DNA, 21 bp, synthetic construct
  misc_feature 1..21: note = Probe
  source 1..21: mol_type = other DNA
tccccgcgcaggttcgaatcc

SEQ ID NO: 50528 - DNA, 22 bp, synthetic construct
  misc_feature 1..22: note = Probe
  source 1..22: mol_type = other DNA
tccccgcgcaggttcgaatcct

SEQ ID NO: 50529 - DNA, 29 bp, synthetic construct
  misc_feature 1..29: note = Probe
  source 1..29: mol_type = other DNA
tccccgcgcaggttcgaatcctgccgact

SEQ ID NO: 50530 - DNA, 30 bp, synthetic construct
  misc_feature 1..30: note = Probe
  source 1..30: mol_type = other DNA
tccccgcgcaggttcgaatcctgccgacta

SEQ ID NO: 50531 - DNA, 32 bp, synthetic construct
  misc_feature 1..32: note = Probe
  source 1..32: mol_type = other DNA
tccccgcgcaggttcgaatcctgccgactacg

SEQ ID NO: 50532 - DNA, 30 bp, synthetic construct
  misc_feature 1..30: note = Probe
  source 1..30: mol_type = other DNA
tccccgcgcaggttcgaatcctgctcacag

SEQ ID NO: 50533 - DNA, 32 bp, synthetic construct
  misc_feature 1..32: note = Probe
  source 1..32: mol_type = other DNA
tccccgcgcaggttcgaatcctgctcacagcg

SEQ ID NO: 50534 - DNA, 18 bp, synthetic construct
  misc_feature 1..18: note = Probe
  source 1..18: mol_type = other DNA
tccccggcacctccaaac

SEQ ID NO: 50535 - DNA, 20 bp, synthetic construct
  misc_feature 1..20: note = Probe
  source 1..20: mol_type = other DNA
tccccggcacctccaaacgg

SEQ ID NO: 50536 - DNA, 19 bp, synthetic construct
  misc_feature 1..19: note = Probe
  source 1..19: mol_type = other DNA
tccccggcacctccaccag

SEQ ID NO: 50537 - DNA, 20 bp, synthetic construct
  misc_feature 1..20: note = Probe
  source 1..20: mol_type = other DNA
tccccggcacctccaccagt

SEQ ID NO: 50538 - DNA, 21 bp, synthetic construct
  misc_feature 1..21: note = Probe
  source 1..21: mol_type = other DNA
tccccggcacctccaccagtt

SEQ ID NO: 50539 - DNA, 22 bp, synthetic construct
  misc_feature 1..22: note = Probe
  source 1..22: mol_type = other DNA
tccccggcacctccaccagttt

SEQ ID NO: 50540 - DNA, 23 bp, synthetic construct
  misc_feature 1..23: note = Probe
  source 1..23: mol_type = other DNA
tccccggcacctccaccagtttt

SEQ ID NO: 50541 - DNA, 18 bp, synthetic construct
  misc_feature 1..18: note = Probe
  source 1..18: mol_type = other DNA
tccccggcatctccattg

SEQ ID NO: 50542 - DNA, 23 bp, synthetic construct
  misc_feature 1..23: note = Probe
  source 1..23: mol_type = other DNA
tccccggcatctccattgtagtt

SEQ ID NO: 50543 - DNA, 28 bp, synthetic construct
  misc_feature 1..28: note = Probe
  source 1..28: mol_type = other DNA
tccccttggtctagtggttaggattcaa

SEQ ID NO: 50544 - DNA, 16 bp, synthetic construct
  misc_feature 1..16: note = Probe
  source 1..16: mol_type = other DNA
tcccgccttttttccc

SEQ ID NO: 50545 - DNA, 17 bp, synthetic construct
  misc_feature 1..17: note = Probe
  source 1..17: mol_type = other DNA
tcccgccttttttcccg

SEQ ID NO: 50546 - DNA, 18 bp, synthetic construct
  misc_feature 1..18: note = Probe
  source 1..18: mol_type = other DNA
tcccgccttttttcccgg

SEQ ID NO: 50547 - DNA, 19 bp, synthetic construct
  misc_feature 1..19: note = Probe
  source 1..19: mol_type = other DNA
tcccgccttttttcccggc

SEQ ID NO: 50548 - DNA, 20 bp, synthetic construct
  misc_feature 1..20: note = Probe
  source 1..20: mol_type = other DNA
tcccgccttttttcccggcg

SEQ ID NO: 50549 - DNA, 22 bp, synthetic construct
  misc_feature 1..22: note = Probe
  source 1..22: mol_type = other DNA
tcccgccttttttcccggcggc

SEQ ID NO: 50550 - DNA, 23 bp, synthetic construct
  misc_feature 1..23: note = Probe
  source 1..23: mol_type = other DNA
tcccgccttttttcccggcggcg

SEQ ID NO: 50551 - DNA, 24 bp, synthetic construct
  misc_feature 1..24: note = Probe
  source 1..24: mol_type = other DNA
tcccgccttttttcccggcggcgg

SEQ ID NO: 50552 - DNA, 25 bp, synthetic construct
  misc_feature 1..25: note = Probe
  source 1..25: mol_type = other DNA
tcccgccttttttcccggcggcggg

SEQ ID NO: 50553 - DNA, 26 bp, synthetic construct
  misc_feature 1..26: note = Probe
  source 1..26: mol_type = other DNA
tcccgccttttttcccggcggcggga

SEQ ID NO: 50554 - DNA, 27 bp, synthetic construct
  misc_feature 1..27: note = Probe
  source 1..27: mol_type = other DNA
tcccgccttttttcccggcggcgggag

SEQ ID NO: 50555 - DNA, 28 bp, synthetic construct
  misc_feature 1..28: note = Probe
  source 1..28: mol_type = other DNA
tcccgccttttttcccggcggcgggaga

SEQ ID NO: 50556 - DNA, 29 bp, synthetic construct
  misc_feature 1..29: note = Probe
  source 1..29: mol_type = other DNA
tcccgccttttttcccggcggcgggagaa

SEQ ID NO: 50557 - DNA, 30 bp, synthetic construct; identical to SEQ ID NO: 7829
  misc_feature 1..30: note = Probe
  source 1..30: mol_type = other DNA

SEQ ID NO: 50558 - DNA, 31 bp, synthetic construct; identical to SEQ ID NO: 7830
  misc_feature 1..31: note = Probe
  source 1..31: mol_type = other DNA

SEQ ID NO: 50559 - DNA, 32 bp, synthetic construct; identical to SEQ ID NO: 7831
  misc_feature 1..32: note = Probe
  source 1..32: mol_type = other DNA

SEQ ID NO: 50560 - DNA, 33 bp, synthetic construct; identical to SEQ ID NO: 7832
  misc_feature 1..33: note = Probe
  source 1..33: mol_type = other DNA

SEQ ID NO: 50561 - DNA, 36 bp, synthetic construct; identical to SEQ ID NO: 23877
  misc_feature 1..36: note = Probe
  source 1..36: mol_type = other DNA

SEQ ID NO: 50562 - DNA, 37 bp, synthetic construct; identical to SEQ ID NO: 23878
  misc_feature 1..37: note = Probe
  source 1..37: mol_type = other DNA

SEQ ID NO: 50563 - DNA, 38 bp, synthetic construct
  misc_feature 1..38: note = Probe
  source 1..38: mol_type = other DNA
tcccgccttttttcccggcggcgggagaagtagattga

SEQ ID NO: 50564 - DNA, 16 bp, synthetic construct
  misc_feature 1..16: note = Probe
  source 1..16: mol_type = other DNA
tcccggacgagccccc

SEQ ID NO: 50565 - DNA, 27 bp, synthetic construct
  misc_feature 1..27: note = Probe
  source 1..27: mol_type = other DNA
tcccgggttcaaatcccggacgagccc

SEQ ID NO: 50566 - DNA, 30 bp, synthetic construct
  misc_feature 1..30: note = Probe
  source 1..30: mol_type = other DNA
tcccgggttcaaatcccggacgagccccct

SEQ ID NO: 50567 - DNA, 27 bp, synthetic construct
  misc_feature 1..27: note = Probe
  source 1..27: mol_type = other DNA
tcccgggttcaatccccggcacctcca

SEQ ID NO: 50568 - DNA, 29 bp, synthetic construct
  misc_feature 1..29: note = Probe
  source 1..29: mol_type = other DNA
tcccgggttcaatccccggcacctccacc

SEQ ID NO: 50569 - DNA, 30 bp, synthetic construct; identical to SEQ ID NO: 7835
  misc_feature 1..30: note = Probe
  source 1..30: mol_type = other DNA

SEQ ID NO: 50570 - DNA, 27 bp, synthetic construct
  misc_feature 1..27: note = Probe
  source 1..27: mol_type = other DNA
tcccgggttcaatccccggcatctcca

SEQ ID NO: 50571 - DNA, 26 bp, synthetic construct
  misc_feature 1..26: note = Probe
  source 1..26: mol_type = other DNA
tcccgggttcgatccccagcatctcc

SEQ ID NO: 50572 - DNA, 28 bp, synthetic construct
  misc_feature 1..28: note = Probe
  source 1..28: mol_type = other DNA
tcccgggttcgatccccagcatctccag

SEQ ID NO: 50573 - DNA, 30 bp, synthetic construct; identical to SEQ ID NO: 41801
  misc_feature 1..30: note = Probe
  source 1..30: mol_type = other DNA

SEQ ID NO: 50574 - DNA, 27 bp, synthetic construct
  misc_feature 1..27: note = Probe
  source 1..27: mol_type = other DNA
tcccgggttcgatccccggcatctcca

SEQ ID NO: 50575 - DNA, 17 bp, synthetic construct
  misc_feature 1..17: note = Probe
  source 1..17: mol_type = other DNA
tcccggtcagggaacca

SEQ ID NO: 50576 - DNA, 26 bp, synthetic construct
  misc_feature 1..26: note = Probe
  source 1..26: mol_type = other DNA
tccctggtctagtggttaggatttat

SEQ ID NO: 50577 - DNA, 27 bp, synthetic construct
  misc_feature 1..27: note = Probe
  source 1..27: mol_type = other DNA
tccctggtctagtggttaggatttatt

SEQ ID NO: 50578 - DNA, 28 bp, synthetic construct
  misc_feature 1..28: note = Probe
  source 1..28: mol_type = other DNA
tccctggtctagtggttaggatttatta

SEQ ID NO: 50579 - DNA, 29 bp, synthetic construct
  misc_feature 1..29: note = Probe
  source 1..29: mol_type = other DNA
tccctggtctagtggttaggatttattat

SEQ ID NO: 50580 - DNA, 29 bp, synthetic construct
  misc_feature 1..29: note = Probe
  source 1..29: mol_type = other DNA
tccctggtggtctaatggttaggagtcgg

SEQ ID NO: 50581 - DNA, 16 bp, synthetic construct
  misc_feature 1..16: note = Probe
  source 1..16: mol_type = other DNA
tccctggtggtctagt

SEQ ID NO: 50582 - DNA, 17 bp, synthetic construct
  misc_feature 1..17: note = Probe
  source 1..17: mol_type = other DNA
tccctggtggtctagtg

SEQ ID NO: 50583 - DNA, 18 bp, synthetic construct
  misc_feature 1..18: note = Probe
  source 1..18: mol_type = other DNA
tccctggtggtctagtgg

SEQ ID NO: 50584 - DNA, 20 bp, synthetic construct
  misc_feature 1..20: note = Probe
  source 1..20: mol_type = other DNA
tccctggtggtctagtggct

SEQ ID NO: 50585 - DNA, 23 bp, synthetic construct
  misc_feature 1..23: note = Probe
  source 1..23: mol_type = other DNA
tccctggtggtctagtggctagg

SEQ ID NO: 50586 - DNA, 24 bp, synthetic construct
  misc_feature 1..24: note = Probe
  source 1..24: mol_type = other DNA
tccctggtggtctagtggctagga

SEQ ID NO: 50587 - DNA, 25 bp, synthetic construct
  misc_feature 1..25: note = Probe
  source 1..25: mol_type = other DNA
tccctggtggtctagtggctaggat

SEQ ID NO: 50588 - DNA, 26 bp, synthetic construct
  misc_feature 1..26: note = Probe
  source 1..26: mol_type = other DNA
tccctggtggtctagtggctaggatt

SEQ ID NO: 50589 - DNA, 27 bp, synthetic construct
  misc_feature 1..27: note = Probe
  source 1..27: mol_type = other DNA
tccctggtggtctagtggctaggattc

SEQ ID NO: 50590 - DNA, 28 bp, synthetic construct
  misc_feature 1..28: note = Probe
  source 1..28: mol_type = other DNA
tccctggtggtctagtggctaggattcg

SEQ ID NO: 50591 - DNA, 29 bp, synthetic construct
  misc_feature 1..29: note = Probe
  source 1..29: mol_type = other DNA
tccctggtggtctagtggctaggattcgg

SEQ ID NO: 50592 - DNA, 37 bp, synthetic construct; identical to SEQ ID NO: 1677
  misc_feature 1..37: note = Probe
  source 1..37: mol_type = other DNA

SEQ ID NO: 50593 - DNA, 39 bp, synthetic construct; identical to SEQ ID NO: 7857
  misc_feature 1..39: note = Probe
  source 1..39: mol_type = other DNA

SEQ ID NO: 50594 - DNA, 50 bp, synthetic construct; identical to SEQ ID NO: 1678
  misc_feature 1..50: note = Probe
  source 1..50: mol_type = other DNA

SEQ ID NO: 50595 - DNA, 19 bp, synthetic construct
  misc_feature 1..19: note = Probe
  source 1..19: mol_type = other DNA
tccctggtggtctagtggt

SEQ ID NO: 50596 - DNA, 20 bp, synthetic construct
  misc_feature 1..20: note = Probe
  source 1..20: mol_type = other DNA
tccctggtggtctagtggtt

SEQ ID NO: 50597 - DNA, 21 bp, synthetic construct
  misc_feature 1..21: note = Probe
  source 1..21: mol_type = other DNA
tccctggtggtctagtggtta

SEQ ID NO: 50598 - DNA, 22 bp, synthetic construct
  misc_feature 1..22: note = Probe
  source 1..22: mol_type = other DNA
tccctggtggtctagtggttag

SEQ ID NO: 50599 - DNA, 23 bp, synthetic construct
  misc_feature 1..23: note = Probe
  source 1..23: mol_type = other DNA
tccctggtggtctagtggttagg

SEQ ID NO: 50600 - DNA, 24 bp, synthetic construct
  misc_feature 1..24: note = Probe
  source 1..24: mol_type = other DNA
tccctggtggtctagtggttagga

SEQ ID NO: 50601 - DNA, 25 bp, synthetic construct
  misc_feature 1..25: note = Probe
  source 1..25: mol_type = other DNA
tccctggtggtctagtggttaggat

SEQ ID NO: 50602 - DNA, 26 bp, synthetic construct
  misc_feature 1..26: note = Probe
  source 1..26: mol_type = other DNA
tccctggtggtctagtggttaggatt

SEQ ID NO: 50603 - DNA, 27 bp, synthetic construct
  misc_feature 1..27: note = Probe
  source 1..27: mol_type = other DNA
tccctggtggtctagtggttaggattc

SEQ ID NO: 50604 - DNA, 28 bp, synthetic construct
  misc_feature 1..28: note = Probe
  source 1..28: mol_type = other DNA
tccctggtggtctagtggttaggattcg

SEQ ID NO: 50605 - DNA, 29 bp, synthetic construct
  misc_feature 1..29: note = Probe
  source 1..29: mol_type = other DNA
tccctggtggtctagtggttaggattcgg

SEQ ID NO: 50606 - DNA, 30 bp, synthetic construct; identical to SEQ ID NO: 7870
  misc_feature 1..30: note = Probe
  source 1..30: mol_type = other DNA

SEQ ID NO: 50607 - DNA, 38 bp, synthetic construct; identical to SEQ ID NO: 1686
  misc_feature 1..38: note = Probe
  source 1..38: mol_type = other DNA

SEQ ID NO: 50608 - DNA, 42 bp, synthetic construct; identical to SEQ ID NO: 1689
  misc_feature 1..42: note = Probe
  source 1..42: mol_type = other DNA

SEQ ID NO: 50609 - DNA, 44 bp, synthetic construct; identical to SEQ ID NO: 7873
  misc_feature 1..44: note = Probe
  source 1..44: mol_type = other DNA

SEQ ID NO: 50610 - DNA, 45 bp, synthetic construct; identical to SEQ ID NO: 7874
  misc_feature 1..45: note = Probe
  source 1..45: mol_type = other DNA

SEQ ID NO: 50611 - DNA, 46 bp, synthetic construct; identical to SEQ ID NO: 7875
  misc_feature 1..46: note = Probe
  source 1..46: mol_type = other DNA

SEQ ID NO: 50612 - DNA, 48 bp, synthetic construct; identical to SEQ ID NO: 7877
  misc_feature 1..48: note = Probe
  source 1..48: mol_type = other DNA

SEQ ID NO: 50613 - DNA, 26 bp, synthetic construct
  misc_feature 1..26: note = Probe
  source 1..26: mol_type = other DNA
tccctggttcgatcccgggtttcggc

SEQ ID NO: 50614 - DNA, 28 bp, synthetic construct
  misc_feature 1..28: note = Probe
  source 1..28: mol_type = other DNA
tccctggttcgatcccgggtttcggcac

SEQ ID NO: 50615 - DNA, 29 bp, synthetic construct
  misc_feature 1..29: note = Probe
  source 1..29: mol_type = other DNA
tccctggttcgatcccgggtttcggcact

SEQ ID NO: 50616 - DNA, 30 bp, synthetic construct
  misc_feature 1..30: note = Probe
  source 1..30: mol_type = other DNA
tccctggttcgatcccgggtttcggcactt

SEQ ID NO: 50617 - DNA, 30 bp, synthetic construct
  misc_feature 1..30: note = Probe
  source 1..30: mol_type = other DNA
tccctggttcgatcccgggtttcggcagct

SEQ ID NO: 50618 - DNA, 37 bp, synthetic construct
  misc_feature 1..37: note = Probe
  source 1..37: mol_type = other DNA
tccgagaggtcccgggttcaaatcccggacgagcccc

SEQ ID NO: 50619 - DNA, 30 bp, synthetic construct; identical to SEQ ID NO: 14328
  misc_feature 1..30: note = Probe
  source 1..30: mol_type = other DNA

SEQ ID NO: 50620 - DNA, 33 bp, synthetic construct; identical to SEQ ID NO: 7886
  misc_feature 1..33: note = Probe
  source 1..33: mol_type = other DNA

SEQ ID NO: 50621 - DNA, 25 bp, synthetic construct
  misc_feature 1..25: note = Probe
  source 1..25: mol_type = other DNA
tccgtagtgtagtggttatcacgtt

SEQ ID NO: 50622 - DNA, 28 bp, synthetic construct
  misc_feature 1..28: note = Probe
  source 1..28: mol_type = other DNA
tccgtagtgtagtggttatcacgttcgc

SEQ ID NO: 50623 - DNA, 29 bp, synthetic construct
  misc_feature 1..29: note = Probe
  source 1..29: mol_type = other DNA
tccgtagtgtagtggttatcacgttcgcc

SEQ ID NO: 50624 - DNA, 30 bp, synthetic construct; identical to SEQ ID NO: 7893
  misc_feature 1..30: note = Probe
  source 1..30: mol_type = other DNA

SEQ ID NO: 50625 - DNA, 31 bp, synthetic construct; identical to SEQ ID NO: 7895
  misc_feature 1..31: note = Probe
  source 1..31: mol_type = other DNA

SEQ ID NO: 50626 - DNA, 32 bp, synthetic construct; identical to SEQ ID NO: 7896
  misc_feature 1..32: note = Probe
  source 1..32: mol_type = other DNA

SEQ ID NO: 50627 - DNA, 50 bp, synthetic construct; identical to SEQ ID NO: 7899
  misc_feature 1..50: note = Probe
  source 1..50: mol_type = other DNA

SEQ ID NO: 50628 - DNA, 33 bp, synthetic construct; identical to SEQ ID NO: 7900
  misc_feature 1..33: note = Probe
  source 1..33: mol_type = other DNA

SEQ ID NO: 50629 - DNA, 39 bp, synthetic construct
  misc_feature 1..39: note = Probe
  source 1..39: mol_type = other DNA
tcctaagccagggattgtgggttcgagtcccatctgggg

SEQ ID NO: 50630 - DNA, 41 bp, synthetic construct
  misc_feature 1..41: note = Probe
  source 1..41: mol_type = other DNA
tcctaagccagggattgtgggttcgagtcccatctggggtg

SEQ ID NO: 50631 - DNA, 42 bp, synthetic construct
  misc_feature 1..42: note = Probe
  source 1..42: mol_type = other DNA
tcctaagccagggattgtgggttcgagtcccatctggggtgg

SEQ ID NO: 50632 - DNA, 43 bp, synthetic construct; identical to SEQ ID NO: 7904
  misc_feature 1..43: note = Probe
  source 1..43: mol_type = other DNA

SEQ ID NO: 50633 - DNA, 44 bp, synthetic construct; identical to SEQ ID NO: 7905
  misc_feature 1..44: note = Probe
  source 1..44: mol_type = other DNA

SEQ ID NO: 50634 - DNA, 19 bp, synthetic construct
  misc_feature 1..19: note = Probe
  source 1..19: mol_type = other DNA
tcctagcctttctattagc

SEQ ID NO: 50635 - DNA, 16 bp, synthetic construct
  misc_feature 1..16: note = Probe
  source 1..16: mol_type = other DNA
tcctcaaagcaataca

SEQ ID NO: 50636 - DNA, 18 bp, synthetic construct
  misc_feature 1..18: note = Probe
  source 1..18: mol_type = other DNA
tcctcaaagcaatacact

SEQ ID NO: 50637 - DNA, 33 bp, synthetic construct; identical to SEQ ID NO: 23983
  misc_feature 1..33: note = Probe
  source 1..33: mol_type = other DNA

SEQ ID NO: 50638 - DNA, 32 bp, synthetic construct; identical to SEQ ID NO: 7912
  misc_feature 1..32: note = Probe
  source 1..32: mol_type = other DNA

SEQ ID NO: 50639 - DNA, 35 bp, synthetic construct; identical to SEQ ID NO: 23986
  misc_feature 1..35: note = Probe
  source 1..35: mol_type = other DNA

SEQ ID NO: 50640 - DNA, 36 bp, synthetic construct; identical to SEQ ID NO: 7913
  misc_feature 1..36: note = Probe
  source 1..36: mol_type = other DNA

SEQ ID NO: 50641 - DNA, 18 bp, synthetic construct
  misc_feature 1..18: note = Probe
  source 1..18: mol_type = other DNA
tcctcgctggggcctcct

SEQ ID NO: 50642 - DNA, 17 bp, synthetic construct
  misc_feature 1..17: note = Probe
  source 1..17: mol_type = other DNA
tcctcgttagtatagtg

SEQ ID NO: 50643 - DNA, 18 bp, synthetic construct
  misc_feature 1..18: note = Probe
  source 1..18: mol_type = other DNA
tcctcgttagtatagtgg

SEQ ID NO: 50644 - DNA, 19 bp, synthetic construct
  misc_feature 1..19: note = Probe
  source 1..19: mol_type = other DNA
tcctcgttagtatagtggt

SEQ ID NO: 50645 - DNA, 20 bp, synthetic construct
  misc_feature 1..20: note = Probe
  source 1..20: mol_type = other DNA
tcctcgttagtatagtggtg

SEQ ID NO: 50646 - DNA, 21 bp, synthetic construct
  misc_feature 1..21: note = Probe
  source 1..21: mol_type = other DNA
tcctcgttagtatagtggtga

SEQ ID NO: 50647 - DNA, 24 bp, synthetic construct
  misc_feature 1..24: note = Probe
  source 1..24: mol_type = other DNA
tcctcgttagtatagtggtgagta

SEQ ID NO: 50648 - DNA, 25 bp, synthetic construct
  misc_feature 1..25: note = Probe
  source 1..25: mol_type = other DNA
tcctcgttagtatagtggtgagtat

SEQ ID NO: 50649 - DNA, 29 bp, synthetic construct
  misc_feature 1..29: note = Probe
  source 1..29: mol_type = other DNA
tcctcgttagtatagtggtgagtatcccc

SEQ ID NO: 50650 - DNA, 40 bp, synthetic construct; identical to SEQ ID NO: 7922
  misc_feature 1..40: note = Probe
  source 1..40: mol_type = other DNA

SEQ ID NO: 50651 - DNA, 41 bp, synthetic construct; identical to SEQ ID NO: 7923
  misc_feature 1..41: note = Probe
  source 1..41: mol_type = other DNA

SEQ ID NO: 50652 - DNA, 24 bp, synthetic construct
  misc_feature 1..24: note = Probe
  source 1..24: mol_type = other DNA
tcctcgttagtatagtggtgagtg

SEQ ID NO: 50653 - DNA, 20 bp, synthetic construct
  misc_feature 1..20: note = Probe
  source 1..20: mol_type = other DNA
tcctcgttagtatagtggtt

SEQ ID NO: 50654 - DNA, 22 bp, synthetic construct
  misc_feature 1..22: note = Probe
  source 1..22: mol_type = other DNA
tcctcgttagtatagtggttag

SEQ ID NO: 50655 - DNA, 23 bp, synthetic construct
  misc_feature 1..23: note = Probe
  source 1..23: mol_type = other DNA
tcctcgttagtatagtggttagt

SEQ ID NO: 50656 - DNA, 26 bp, synthetic construct
  misc_feature 1..26: note = Probe
  source 1..26: mol_type = other DNA
tcctcgttagtatagtggttagtatc

SEQ ID NO: 50657 - DNA, 29 bp, synthetic construct
  misc_feature 1..29: note = Probe
  source 1..29: mol_type = other DNA
tcctcgttagtatagtggttagtatcccc

SEQ ID NO: 50658 - DNA, 31 bp, synthetic construct; identical to SEQ ID NO: 37386
  misc_feature 1..31: note = Probe
  source 1..31: mol_type = other DNA

SEQ ID NO: 50659 - DNA, 27 bp, synthetic construct
  misc_feature 1..27: note = Probe
  source 1..27: mol_type = other DNA
tcctgagttcgaacctcagagggggca

SEQ ID NO: 50660 - DNA, 30 bp, synthetic construct
  misc_feature 1..30: note = Probe
  source 1..30: mol_type = other DNA
tcctgagttcgaacctcagagggggcaagg

SEQ ID NO: 50661 - DNA, 30 bp, synthetic construct
  misc_feature 1..30: note = Probe
  source 1..30: mol_type = other DNA
tcctgagttcgaacctcagagggggcagct

SEQ ID NO: 50662 - DNA, 22 bp, synthetic construct
  misc_feature 1..22: note = Probe
  source 1..22: mol_type = other DNA
tcgaaaccatcctctgctaggt

SEQ ID NO: 50663 - DNA, 21 bp, synthetic construct
  misc_feature 1..21: note = Probe
  source 1..21: mol_type = other DNA
tcgaaaccatcctctgctatc

SEQ ID NO: 50664 - DNA, 21 bp, synthetic construct
  misc_feature 1..21: note = Probe
  source 1..21: mol_type = other DNA
tcgaaaccatcctctgctatt

SEQ ID NO: 50665 - DNA, 19 bp, synthetic construct
  misc_feature 1..19: note = Probe
  source 1..19: mol_type = other DNA
tcgaaaccgggcggaaaca

SEQ ID NO: 50666 - DNA, 22 bp, synthetic construct
  misc_feature 1..22: note = Probe
  source 1..22: mol_type = other DNA
tcgaaaccgggcggaaacacct

SEQ ID NO: 50667 - DNA, 22 bp, synthetic construct
  misc_feature 1..22: note = Probe
  source 1..22: mol_type = other DNA
tcgaaccccgtccgtgcctgat

SEQ ID NO: 50668 - DNA, 28 bp, synthetic construct
  misc_feature 1..28: note = Probe
  source 1..28: mol_type = other DNA
tcgaagaagcagcttcaaacctgccggg

SEQ ID NO: 50669 - DNA, 29 bp, synthetic construct
  misc_feature 1..29: note = Probe
  source 1..29: mol_type = other DNA
tcgaagaagcagcttcaaacctgccgggg

SEQ ID NO: 50670 - DNA, 31 bp, synthetic construct; identical to SEQ ID NO: 7937
  misc_feature 1..31: note = Probe
  source 1..31: mol_type = other DNA

SEQ ID NO: 50671 - DNA, 32 bp, synthetic construct; identical to SEQ ID NO: 7938
  misc_feature 1..32: note = Probe
  source 1..32: mol_type = other DNA

SEQ ID NO: 50672 - DNA, 34 bp, synthetic construct; identical to SEQ ID NO: 7940
  misc_feature 1..34: note = Probe
  source 1..34: mol_type = other DNA

SEQ ID NO: 50673 - DNA, 35 bp, synthetic construct; identical to SEQ ID NO: 7941
  misc_feature 1..35: note = Probe
  source 1..35: mol_type = other DNA

SEQ ID NO: 50674 - DNA, 21 bp, synthetic construct
  misc_feature 1..21: note = Probe
  source 1..21: mol_type = other DNA
tcgaatcccaccgctgccaca

SEQ ID NO: 50675 - DNA, 22 bp, synthetic construct
  misc_feature 1..22: note = Probe
  source 1..22: mol_type = other DNA
tcgaatcccaccgctgccacac

SEQ ID NO: 50676 - DNA, 22 bp, synthetic construct
  misc_feature 1..22: note = Probe
  source 1..22: mol_type = other DNA
tcgaatcccaccgctgccaggt

SEQ ID NO: 50677 - DNA, 19 bp, synthetic construct
  misc_feature 1..19: note = Probe
  source 1..19: mol_type = other DNA
tcgaatcccacttctgaca

SEQ ID NO: 50678 - DNA, 22 bp, synthetic construct
  misc_feature 1..22: note = Probe
  source 1..22: mol_type = other DNA
tcgaatcccacttctgacacaa

SEQ ID NO: 50679 - DNA, 22 bp, synthetic construct
  misc_feature 1..22: note = Probe
  source 1..22: mol_type = other DNA
tcgaatcccagcggtgcctccg

SEQ ID NO: 50680 - DNA, 17 bp, synthetic construct
  misc_feature 1..17: note = Probe
  source 1..17: mol_type = other DNA
tcgaatcccatcctcgt

SEQ ID NO: 50681 - DNA, 19 bp, synthetic construct
  misc_feature 1..19: note = Probe
  source 1..19: mol_type = other DNA
tcgaatcccatcctcgtcg

SEQ ID NO: 50682 - DNA, 20 bp, synthetic construct
  misc_feature 1..20: note = Probe
  source 1..20: mol_type = other DNA
tcgaatcccatcctcgtcgc

SEQ ID NO: 50683 - DNA, 21 bp, synthetic construct
  misc_feature 1..21: note = Probe
  source 1..21: mol_type = other DNA
tcgaatcccatcctcgtcgct

SEQ ID NO: 50684 - DNA, 20 bp, synthetic construct
  misc_feature 1..20: note = Probe
  source 1..20: mol_type = other DNA
tcgaatccgagtcacggcaa

SEQ ID NO: 50685 - DNA, 21 bp, synthetic construct
  misc_feature 1..21: note = Probe
  source 1..21: mol_type = other DNA
tcgaatccgagtcacggcaaa

SEQ ID NO: 50686 - DNA, 20 bp, synthetic construct
  misc_feature 1..20: note = Probe
  source 1..20: mol_type = other DNA
tcgaatccgagtcacggcag

SEQ ID NO: 50687 - DNA, 22 bp, synthetic construct
  misc_feature 1..22: note = Probe
  source 1..22: mol_type = other DNA
tcgaatccgagtcacggcaggt

SEQ ID NO: 50688 - DNA, 20 bp, synthetic construct
  misc_feature 1..20: note = Probe
  source 1..20: mol_type = other DNA
tcgaatccgagtcacggcat

SEQ ID NO: 50689 - DNA, 22 bp, synthetic construct
  misc_feature 1..22: note = Probe
  source 1..22: mol_type = other DNA
tcgaatccgagtcacggcattg

SEQ ID NO: 50690 - DNA, 22 bp, synthetic construct
  misc_feature 1..22: note = Probe
  source 1..22: mol_type = other DNA
tcgaatcctgccgactacggca

SEQ ID NO: 50691 - DNA, 22 bp, synthetic construct
  misc_feature 1..22: note = Probe
  source 1..22: mol_type = other DNA
tcgaatcctgccgactacgtca

SEQ ID NO: 50692 - DNA, 33 bp, synthetic construct; identical to SEQ ID NO: 7958
  misc_feature 1..33: note = Probe
  source 1..33: mol_type = other DNA

SEQ ID NO: 50693 - DNA, 38 bp, synthetic construct; identical to SEQ ID NO: 24034
  misc_feature 1..38: note = Probe
  source 1..38: mol_type = other DNA

SEQ ID NO: 50694 - DNA, 21 bp, synthetic construct
  misc_feature 1..21: note = Probe
  source 1..21: mol_type = other DNA
tcgactcccggtatgggaaca

SEQ ID NO: 50695 - DNA, 22 bp, synthetic construct
  misc_feature 1..22: note = Probe
  source 1..22: mol_type = other DNA
tcgactcccggtatgggaacaa

SEQ ID NO: 50696 - DNA, 21 bp, synthetic construct
  misc_feature 1..21: note = Probe
  source 1..21: mol_type = other DNA
tcgactcccggtatgggaacg

SEQ ID NO: 50697 - DNA, 19 bp, synthetic construct
  misc_feature 1..19: note = Probe
  source 1..19: mol_type = other DNA
tcgactcccggtgtgggaa

SEQ ID NO: 50698 - DNA, 21 bp, synthetic construct
  misc_feature 1..21: note = Probe
  source 1..21: mol_type = other DNA
tcgactcccggtgtgggaacg

SEQ ID NO: 50699 - DNA, 22 bp, synthetic construct
  misc_feature 1..22: note = Probe
  source 1..22: mol_type = other DNA
tcgactcccggtgtgggaacgc

SEQ ID NO: 50700 - DNA, 17 bp, synthetic construct
  misc_feature 1..17: note = Probe
  source 1..17: mol_type = other DNA
tcgagcccacccaggga

SEQ ID NO: 50701 - DNA, 19 bp, synthetic construct
  misc_feature 1..19: note = Probe
  source 1..19: mol_type = other DNA
tcgagcccacccagggacg

SEQ ID NO: 50702 - DNA, 20 bp, synthetic construct
  misc_feature 1..20: note = Probe
  source 1..20: mol_type = other DNA
tcgagcccacccagggacgc

SEQ ID NO: 50703 - DNA, 21 bp, synthetic construct
  misc_feature 1..21: note = Probe
  source 1..21: mol_type = other DNA
tcgagcccacccagggacgcc

SEQ ID NO: 50704 - DNA, 22 bp, synthetic construct
  misc_feature 1..22: note = Probe
  source 1..22: mol_type = other DNA
tcgagcccacccagggacgcct

SEQ ID NO: 50705 - DNA, 20 bp, synthetic construct
  misc_feature 1..20: note = Probe
  source 1..20: mol_type = other DNA
tcgagccccagtggaaccac

SEQ ID NO: 50706 - DNA, 21 bp, synthetic construct
  misc_feature 1..21: note = Probe
  source 1..21: mol_type = other DNA
tcgagccccagtggaaccacg

SEQ ID NO: 50707 - DNA, 19 bp, synthetic construct
  misc_feature 1..19: note = Probe
  source 1..19: mol_type = other DNA
tcgagcctcacctggagca

SEQ ID NO: 50708 - DNA, 22 bp, synthetic construct
  misc_feature 1..22: note = Probe
  source 1..22: mol_type = other DNA
tcgagtcccacctggggtgtcg

SEQ ID NO: 50709 - DNA, 22 bp, synthetic construct
  misc_feature 1..22: note = Probe
  source 1..22: mol_type = other DNA
tcgagtcccatctgggtcgcgt

SEQ ID NO: 50710 - DNA, 22 bp, synthetic construct
  misc_feature 1..22: note = Probe
  source 1..22: mol_type = other DNA
tcgagtcccttcgtggtcgttg

SEQ ID NO: 50711 - DNA, 21 bp, synthetic construct
  misc_feature 1..21: note = Probe
  source 1..21: mol_type = other DNA
tcgatccccggcatctccatt

SEQ ID NO: 50712 - DNA, 22 bp, synthetic construct
  misc_feature 1..22: note = Probe
  source 1..22: mol_type = other DNA
tcgatccccggcatctccattg

SEQ ID NO: 50713 - DNA, 22 bp, synthetic construct
  misc_feature 1..22: note = Probe
  source 1..22: mol_type = other DNA
tcgatccccgtacgggccacga

SEQ ID NO: 50714 - DNA, 22 bp, synthetic construct
  misc_feature 1..22: note = Probe
  source 1..22: mol_type = other DNA
tcgatccccgtacgggccactg

SEQ ID NO: 50715 - DNA, 22 bp, synthetic construct
  misc_feature 1..22: note = Probe
  source 1..22: mol_type = other DNA
tcgatcccgggcggaaacaggt

SEQ ID NO: 50716 - DNA, 22 bp, synthetic construct
  misc_feature 1..22: note = Probe
  source 1..22: mol_type = other DNA
tcgatcctcacacggggcacaa

SEQ ID NO: 50717 - DNA, 21 bp, synthetic construct
  misc_feature 1..21: note = Probe
  source 1..21: mol_type = other DNA
tcgatgcccgcatcctccact

SEQ ID NO: 50718 - DNA, 20 bp, synthetic construct
  misc_feature 1..20: note = Probe
  source 1..20: mol_type = other DNA
tcgattccccgacggggaga

SEQ ID NO: 50719 - DNA, 21 bp, synthetic construct
  misc_feature 1..21: note = Probe
  source 1..21: mol_type = other DNA
tcgattccccgacggggagac

SEQ ID NO: 50720 - DNA, 20 bp, synthetic construct
  misc_feature 1..20: note = Probe
  source 1..20: mol_type = other DNA
tcgattccccgacggggagg

SEQ ID NO: 50721 - DNA, 21 bp, synthetic construct
  misc_feature 1..21: note = Probe
  source 1..21: mol_type = other DNA
tcgattccccgacggggaggc

SEQ ID NO: 50722 - DNA, 22 bp, synthetic construct
  misc_feature 1..22: note = Probe
  source 1..22: mol_type = other DNA
tcgattccccgacggggaggca

SEQ ID NO: 50723 - DNA, 19 bp, synthetic construct
  misc_feature 1..19: note = Probe
  source 1..19: mol_type = other DNA
tcgattcccggccaacgca

SEQ ID NO: 50724 - DNA, 20 bp, synthetic construct
  misc_feature 1..20: note = Probe
  source 1..20: mol_type = other DNA
tcgattcccggccaacgcaa

SEQ ID NO: 50725 - DNA, 22 bp, synthetic construct
  misc_feature 1..22: note = Probe
  source 1..22: mol_type = other DNA
tcgattcccggccaacgcaagt

SEQ ID NO: 50726 - DNA, 20 bp, synthetic construct
  misc_feature 1..20: note = Probe
  source 1..20: mol_type = other DNA
tcgattcccggccaacgcag

SEQ ID NO: 50727 - DNA, 21 bp, synthetic construct
  misc_feature 1..21: note = Probe
  source 1..21: mol_type = other DNA
tcgattcccggccaacgcagc

SEQ ID NO: 50728 - DNA, 22 bp, synthetic construct
  misc_feature 1..22: note = Probe
  source 1..22: mol_type = other DNA
tcgattcccggccaacgcagtg

SEQ ID NO: 50729 - DNA, 20 bp, synthetic construct
  misc_feature 1..20: note = Probe
  source 1..20: mol_type = other DNA
tcgattcccggccaacgcat

SEQ ID NO: 50730 - DNA, 19 bp, synthetic construct
  misc_feature 1..19: note = Probe
  source 1..19: mol_type = other DNA
tcgattcccggccaatgca

SEQ ID NO: 50731 - DNA, 22 bp, synthetic construct
  misc_feature 1..22: note = Probe
  source 1..22: mol_type = other DNA
tcgattcccggccaatgcacga

SEQ ID NO: 50732 - DNA, 22 bp, synthetic construct
  misc_feature 1..22: note = Probe
  source 1..22: mol_type = other DNA
tcgattcccggccaatgcagca

SEQ ID NO: 50733 - DNA, 22 bp, synthetic construct
  misc_feature 1..22: note = Probe
  source 1..22: mol_type = other DNA
tcgattcccggcccatgcagca

SEQ ID NO: 50734 - DNA, 19 bp, synthetic construct
  misc_feature 1..19: note = Probe
  source 1..19: mol_type = other DNA
tcgattcccgggcggcgca

SEQ ID NO: 50735 - DNA, 22 bp, synthetic construct
  misc_feature 1..22: note = Probe
  source 1..22: mol_type = other DNA
tcgattcccgggcggcgcactt

SEQ ID NO: 50736 - DNA, 21 bp, synthetic construct
  misc_feature 1..21: note = Probe
  source 1..21: mol_type = other DNA
tcgattcccggtcagggaaca

SEQ ID NO: 50737 - DNA, 22 bp, synthetic construct
  misc_feature 1..22: note = Probe
  source 1..22: mol_type = other DNA
tcgattcccggtcagggaacaa

SEQ ID NO: 50738 - DNA, 22 bp, synthetic construct
  misc_feature 1..22: note = Probe
  source 1..22: mol_type = other DNA
tcgattcccggtcatggaacca

SEQ ID NO: 50739 - DNA, 22 bp, synthetic construct
  misc_feature 1..22: note = Probe
  source 1..22: mol_type = other DNA
tcgattcctggtcagggaacca

SEQ ID NO: 50740 - DNA, 27 bp, synthetic construct
  misc_feature 1..27: note = Probe
  source 1..27: mol_type = other DNA
tcgcataaaacttaaaactttacagtc

SEQ ID NO: 50741 - DNA, 31 bp, synthetic construct
  misc_feature 1..31: note = Probe
  source 1..31: mol_type = other DNA
tcgcataaaacttaaaactttacagtcagag

SEQ ID NO: 50742 - DNA, 35 bp, synthetic construct; identical to SEQ ID NO: 7987
  misc_feature 1..35: note = Probe
  source 1..35: mol_type = other DNA

SEQ ID NO: 50743 - DNA, 36 bp, synthetic construct; identical to SEQ ID NO: 34671
  misc_feature 1..36: note = Probe
  source 1..36: mol_type = other DNA

SEQ ID NO: 50744 - DNA, 50 bp, synthetic construct; identical to SEQ ID NO: 7991
  misc_feature 1..50: note = Probe
  source 1..50: mol_type = other DNA

SEQ ID NO: 50745 - DNA, 26 bp, synthetic construct
  misc_feature 1..26: note = Probe
  source 1..26: mol_type = other DNA
tcgcctgccacgcgggaggcccgggt

SEQ ID NO: 50746 - DNA, 23 bp, synthetic construct
  misc_feature 1..23: note = Probe
  source 1..23: mol_type = other DNA
tcgccttaattttaataatcaac

SEQ ID NO: 50747 - DNA, 30 bp, synthetic construct
  misc_feature 1..30: note = Probe
  source 1..30: mol_type = other DNA
tcgcgggttcgatccccgtacgggccactg

SEQ ID NO: 50748 - DNA, 44 bp, synthetic construct
  misc_feature 1..44: note = Probe
  source 1..44: mol_type = other DNA
tcggctgttaaccgaaaggttggtggttcgagcccacccaggga

SEQ ID NO: 50749 - DNA, 46 bp, synthetic construct
  misc_feature 1..46: note = Probe
  source 1..46: mol_type = other DNA
tcggctgttaaccgaaaggttggtggttcgagcccacccagggacg

SEQ ID NO: 50750 - DNA, 50 bp, synthetic construct
  misc_feature 1..50: note = Probe
  source 1..50: mol_type = other DNA
tcggctgttaaccgaaaggttggtggttcgagcccacccagggacgcctc

SEQ ID NO: 50751 - DNA, 50 bp, synthetic construct
  misc_feature 1..50: note = Probe
  source 1..50: mol_type = other DNA
tcggctgttaaccgaaaggttggtggttcgagcccacccagggacgcgtg

SEQ ID NO: 50752 - DNA, 29 bp, synthetic construct
  misc_feature 1..29: note = Probe
  source 1..29: mol_type = other DNA
tcgtggttgtagtccgtgcgagaataatg

SEQ ID NO: 50753 - DNA, 34 bp, synthetic construct; identical to SEQ ID NO: 24121
  misc_feature 1..34: note = Probe
  source 1..34: mol_type = other DNA

SEQ ID NO: 50754 - DNA, 35 bp, synthetic construct; identical to SEQ ID NO: 7996
  misc_feature 1..35: note = Probe
  source 1..35: mol_type = other DNA

SEQ ID NO: 50755 - DNA, 38 bp, synthetic construct
  misc_feature 1..38: note = Probe
  source 1..38: mol_type = other DNA
tctaaaggtccctggttcgatcccgggtttcggcactt

SEQ ID NO: 50756 - DNA, 21 bp, synthetic construct
  misc_feature 1..21: note = Probe
  source 1..21: mol_type = other DNA
tctaacaacatggctttctca

SEQ ID NO: 50757 - DNA, 23 bp, synthetic construct
  misc_feature 1..23: note = Probe
  source 1..23: mol_type = other DNA
tctaacaacatggctttctcaac

SEQ ID NO: 50758 - DNA, 24 bp, synthetic construct
  misc_feature 1..24: note = Probe
  source 1..24: mol_type = other DNA
tctaacaacatggctttctcaact

SEQ ID NO: 50759 - DNA, 21 bp, synthetic construct
  misc_feature 1..21: note = Probe
  source 1..21: mol_type = other DNA
tctagcggttaggattcctgg

SEQ ID NO: 50760 - DNA, 20 bp, synthetic construct
  misc_feature 1..20: note = Probe
  source 1..20: mol_type = other DNA
tctaggggtatgattctcgc

SEQ ID NO: 50761 - DNA, 26 bp, synthetic construct
  misc_feature 1..26: note = Probe
  source 1..26: mol_type = other DNA
tctaggttcgactcctggctggctcg

SEQ ID NO: 50762 - DNA, 26 bp, synthetic construct
  misc_feature 1..26: note = Probe
  source 1..26: mol_type = other DNA
tctcagggatgggttcgattctcata

SEQ ID NO: 50763 - DNA, 29 bp, synthetic construct
  misc_feature 1..29: note = Probe
  source 1..29: mol_type = other DNA
tctcagggatgggttcgattctcatagtc

SEQ ID NO: 50764 - DNA, 31 bp, synthetic construct; identical to SEQ ID NO: 24132
  misc_feature 1..31: note = Probe
  source 1..31: mol_type = other DNA

SEQ ID NO: 50765 - DNA, 33 bp, synthetic construct; identical to SEQ ID NO: 1726
  misc_feature 1..33: note = Probe
  source 1..33: mol_type = other DNA

SEQ ID NO: 50766 - DNA, 36 bp, synthetic construct; identical to SEQ ID NO: 8002
  misc_feature 1..36: note = Probe
  source 1..36: mol_type = other DNA

SEQ ID NO: 50767 - DNA, 33 bp, synthetic construct; identical to SEQ ID NO: 8003
  misc_feature 1..33: note = Probe
  source 1..33: mol_type = other DNA

SEQ ID NO: 50768 - DNA, 35 bp, synthetic construct
  misc_feature 1..35: note = Probe
  source 1..35: mol_type = other DNA
tctcagggtcgtgggttcgagccccacgttgggcg

SEQ ID NO: 50769 - DNA, 24 bp, synthetic construct
  misc_feature 1..24: note = Probe
  source 1..24: mol_type = other DNA
tctcataatctgaaggtcctgagt

SEQ ID NO: 50770 - DNA, 46 bp, synthetic construct; identical to SEQ ID NO: 41985
  misc_feature 1..46: note = Probe
  source 1..46: mol_type = other DNA

SEQ ID NO: 50771 - DNA, 37 bp, synthetic construct
  misc_feature 1..37: note = Probe
  source 1..37: mol_type = other DNA
tctccaatggaggcgtgggttcgaatcccacttctga

SEQ ID NO: 50772 - DNA, 31 bp, synthetic construct; identical to SEQ ID NO: 24138
  misc_feature 1..31: note = Probe
  source 1..31: mol_type = other DNA

SEQ ID NO: 50773 - DNA, 38 bp, synthetic construct; identical to SEQ ID NO: 24140
  misc_feature 1..38: note = Probe
  source 1..38: mol_type = other DNA

SEQ ID NO: 50774 - DNA, 35 bp, synthetic construct; identical to SEQ ID NO: 34817
  misc_feature 1..35: note = Probe
  source 1..35: mol_type = other DNA

SEQ ID NO: 50775 - DNA, 35 bp, synthetic construct; identical to SEQ ID NO: 24143
  misc_feature 1..35: note = Probe
  source 1..35: mol_type = other DNA

SEQ ID NO: 50776 - DNA, 38 bp, synthetic construct; identical to SEQ ID NO: 8005
  misc_feature 1..38: note = Probe
  source 1..38: mol_type = other DNA

SEQ ID NO: 50777 - DNA, 37 bp, synthetic construct; identical to SEQ ID NO: 8010
  misc_feature 1..37: note = Probe
  source 1..37: mol_type = other DNA

SEQ ID NO: 50778 - DNA, 33 bp, synthetic construct; identical to SEQ ID NO: 8013
  misc_feature 1..33: note = Probe
  source 1..33: mol_type = other DNA

SEQ ID NO: 50779 - DNA, 35 bp, synthetic construct; identical to SEQ ID NO: 34835
  misc_feature 1..35: note = Probe
  source 1..35: mol_type = other DNA

SEQ ID NO: 50780 - DNA, 50 bp, synthetic construct; identical to SEQ ID NO: 8014
  misc_feature 1..50: note = Probe
  source 1..50: mol_type = other DNA

SEQ ID NO: 50781 - DNA, 45 bp, synthetic construct
  misc_feature 1..45: note = Probe
  source 1..45: mol_type = other DNA
tcttaggccccaaaaattttggtgcaactccaaataaaagtaata

SEQ ID NO: 50782 - DNA, 37 bp, synthetic construct; identical to SEQ ID NO: 8017
  misc_feature 1..37: note = Probe
  source 1..37: mol_type = other DNA

SEQ ID NO: 50783 - DNA, 25 bp, synthetic construct
  misc_feature 1..25: note = Probe
  source 1..25: mol_type = other DNA
tgaaaacctttttccaaggacaaat

SEQ ID NO: 50784 - DNA, 40 bp, synthetic construct; identical to SEQ ID NO: 24167
  misc_feature 1..40: note = Probe
  source 1..40: mol_type = other DNA

SEQ ID NO: 50785 - DNA, 41 bp, synthetic construct; identical to SEQ ID NO: 8021
  misc_feature 1..41: note = Probe
  source 1..41: mol_type = other DNA

SEQ ID NO: 50786 - DNA, 36 bp, synthetic construct; identical to SEQ ID NO: 24172
  misc_feature 1..36: note = Probe
  source 1..36: mol_type = other DNA

SEQ ID NO: 50787 - DNA, 33 bp, synthetic construct; identical to SEQ ID NO: 8024
  misc_feature 1..33: note = Probe
  source 1..33: mol_type = other DNA

SEQ ID NO: 50788 - DNA, 36 bp, synthetic construct; identical to SEQ ID NO: 8025
  misc_feature 1..36: note = Probe
  source 1..36: mol_type = other DNA

SEQ ID NO: 50789 - DNA, 21 bp, synthetic construct
  misc_feature 1..21: note = Probe
  source 1..21: mol_type = other DNA
tgaatccagcgatccgagttc

SEQ ID NO: 50790 - DNA, 19 bp, synthetic construct
  misc_feature 1..19: note = Probe
  source 1..19: mol_type = other DNA
tgaatctgacaacagaggc

SEQ ID NO: 50791 - DNA, 27 bp, synthetic construct
  misc_feature 1..27: note = Probe
  source 1..27: mol_type = other DNA
tgaatctgacaacagaggcttacgacc

SEQ ID NO: 50792 - DNA, 28 bp, synthetic construct
  misc_feature 1..28: note = Probe
  source 1..28: mol_type = other DNA
tgaatctgacaacagaggcttacgaccc

SEQ ID NO: 50793 - DNA, 29 bp, synthetic construct
  misc_feature 1..29: note = Probe
  source 1..29: mol_type = other DNA
tgaatctgacaacagaggcttacgacccc

SEQ ID NO: 50794 - DNA, 30 bp, synthetic construct; identical to SEQ ID NO: 1734
  misc_feature 1..30: note = Probe
  source 1..30: mol_type = other DNA

SEQ ID NO: 50795 - DNA, 31 bp, synthetic construct; identical to SEQ ID NO: 1735
  misc_feature 1..31: note = Probe
  source 1..31: mol_type = other DNA

SEQ ID NO: 50796 - DNA, 33 bp, synthetic construct; identical to SEQ ID NO: 1737
  misc_feature 1..33: note = Probe
  source 1..33: mol_type = other DNA

SEQ ID NO: 50797 - DNA, 35 bp, synthetic construct; identical to SEQ ID NO: 1739
  misc_feature 1..35: note = Probe
  source 1..35: mol_type = other DNA

SEQ ID NO: 50798 - DNA, 36 bp, synthetic construct; identical to SEQ ID NO: 1740
  misc_feature 1..36: note = Probe
  source 1..36: mol_type = other DNA

SEQ ID NO: 50799 - DNA, 39 bp, synthetic construct; identical to SEQ ID NO: 8042
  misc_feature 1..39: note = Probe
  source 1..39: mol_type = other DNA

SEQ ID NO: 50800 - DNA, 40 bp, synthetic construct; identical to SEQ ID NO: 8043
  misc_feature 1..40: note = Probe
  source 1..40: mol_type = other DNA

SEQ ID NO: 50801 - DNA, 41 bp, synthetic construct; identical to SEQ ID NO: 8044
  misc_feature 1..41: note = Probe
  source 1..41: mol_type = other DNA

SEQ ID NO: 50802 - DNA, 46 bp, synthetic construct; identical to SEQ ID NO: 8048
  misc_feature 1..46: note = Probe
  source 1..46: mol_type = other DNA

SEQ ID NO: 50803 - DNA, 50 bp, synthetic construct
  misc_feature 1..50: note = Probe
  source 1..50: mol_type = other DNA
tgaattgcaaattcgaagaagcagcttcaaacctgccggggcttctcccg

SEQ ID NO: 50804 - DNA, 23 bp, synthetic construct
  misc_feature 1..23: note = Probe
  source 1..23: mol_type = other DNA
tgacaacagaggcttacgacccc

SEQ ID NO: 50805 - DNA, 33 bp, synthetic construct; identical to SEQ ID NO: 8057
  misc_feature 1..33: note = Probe
  source 1..33: mol_type = other DNA

SEQ ID NO: 50806 - DNA, 34 bp, synthetic construct; identical to SEQ ID NO: 8058
  misc_feature 1..34: note = Probe
  source 1..34: mol_type = other DNA

SEQ ID NO: 50807 - DNA, 35 bp, synthetic construct; identical to SEQ ID NO: 8059
  misc_feature 1..35: note = Probe
  source 1..35: mol_type = other DNA

SEQ ID NO: 50808 - DNA, 29 bp, synthetic construct
  misc_feature 1..29: note = Probe
  source 1..29: mol_type = other DNA
tgacccgggttcgattcccggccaacgca

SEQ ID NO: 50809 - DNA, 32 bp, synthetic construct; identical to SEQ ID NO: 8061
  misc_feature 1..32: note = Probe
  source 1..32: mol_type = other DNA

SEQ ID NO: 50810 - DNA, 32 bp, synthetic construct; identical to SEQ ID NO: 8062
  misc_feature 1..32: note = Probe
  source 1..32: mol_type = other DNA

SEQ ID NO: 50811 - DNA, 26 bp, synthetic construct
  misc_feature 1..26: note = Probe
  source 1..26: mol_type = other DNA
tgaggccccgggttcgatccccggca

SEQ ID NO: 50812 - DNA, 35 bp, synthetic construct; identical to SEQ ID NO: 24211
  misc_feature 1..35: note = Probe
  source 1..35: mol_type = other DNA

SEQ ID NO: 50813 - DNA, 31 bp, synthetic construct; identical to SEQ ID NO: 8065
  misc_feature 1..31: note = Probe
  source 1..31: mol_type = other DNA

SEQ ID NO: 50814 - DNA, 33 bp, synthetic construct; identical to SEQ ID NO: 8066
  misc_feature 1..33: note = Probe
  source 1..33: mol_type = other DNA

SEQ ID NO: 50815 - DNA, 24 bp, synthetic construct
  misc_feature 1..24: note = Probe
  source 1..24: mol_type = other DNA
tgagggttcgagtcccttcgtggt

SEQ ID NO: 50816 - DNA, 25 bp, synthetic construct
  misc_feature 1..25: note = Probe
  source 1..25: mol_type = other DNA
tgagggttcgagtcccttcgtggtc

SEQ ID NO: 50817 - DNA, 27 bp, synthetic construct
  misc_feature 1..27: note = Probe
  source 1..27: mol_type = other DNA
tgagggttcgagtcccttcgtggtcgg

SEQ ID NO: 50818 - DNA, 27 bp, synthetic construct
  misc_feature 1..27: note = Probe
  source 1..27: mol_type = other DNA
tgagggttcgagtcccttcgtggtcgt

SEQ ID NO: 50819 - DNA, 27 bp, synthetic construct
  misc_feature 1..27: note = Probe
  source 1..27: mol_type = other DNA
tgagttcgagcctcacctggagcattg

SEQ ID NO: 50820 - DNA, 26 bp, synthetic construct
  misc_feature 1..26: note = Probe
  source 1..26: mol_type = other DNA
tgagttcgatcctcacacggggcaca

SEQ ID NO: 50821 - DNA, 27 bp, synthetic construct
  misc_feature 1..27: note = Probe
  source 1..27: mol_type = other DNA
tgagttcgatcctcacacggggcacaa

SEQ ID NO: 50822 - DNA, 22 bp, synthetic construct
  misc_feature 1..22: note = Probe
  source 1..22: mol_type = other DNA
tgataatcatatttaccaaatg

SEQ ID NO: 50823 - DNA, 33 bp, synthetic construct
  misc_feature 1..33: note = Probe
  source 1..33: mol_type = other DNA
tgatagagtaaataataggagcttaaaccccct

SEQ ID NO: 50824 - DNA, 43 bp, synthetic construct; identical to SEQ ID NO: 8070
  misc_feature 1..43: note = Probe
  source 1..43: mol_type = other DNA

SEQ ID NO: 50825 - DNA, 44 bp, synthetic construct; identical to SEQ ID NO: 8071
  misc_feature 1..44: note = Probe
  source 1..44: mol_type = other DNA

SEQ ID NO: 50826 - DNA, 25 bp, synthetic construct
  misc_feature 1..25: note = Probe
  source 1..25: mol_type = other DNA
tgatgcagagtggggttttgcagtc

SEQ ID NO: 50827 - DNA, 32 bp, synthetic construct; identical to SEQ ID NO: 8074
  misc_feature 1..32: note = Probe
  source 1..32: mol_type = other DNA

SEQ ID NO: 50828 - DNA, 28 bp, synthetic construct
  misc_feature 1..28: note = Probe
  source 1..28: mol_type = other DNA
tgcaaattcgaagaagcagcttcaaacc

SEQ ID NO: 50829 - DNA, 35 bp, synthetic construct
  misc_feature 1..35: note = Probe
  source 1..35: mol_type = other DNA
tgcaaattcgaagaagcagcttcaaacctgccggg

SEQ ID NO: 50830 - DNA, 36 bp, synthetic construct; identical to SEQ ID NO: 8078
  misc_feature 1..36: note = Probe
  source 1..36: mol_type = other DNA

SEQ ID NO: 50831 - DNA, 39 bp, synthetic construct; identical to SEQ ID NO: 8079
  misc_feature 1..39: note = Probe
  source 1..39: mol_type = other DNA

SEQ ID NO: 50832 - DNA, 40 bp, synthetic construct; identical to SEQ ID NO: 8080
  misc_feature 1..40: note = Probe
  source 1..40: mol_type = other DNA

SEQ ID NO: 50833 - DNA, 41 bp, synthetic construct; identical to SEQ ID NO: 8081
  misc_feature 1..41: note = Probe
  source 1..41: mol_type = other DNA

SEQ ID NO: 50834 - DNA, 42 bp, synthetic construct; identical to SEQ ID NO: 8082
  misc_feature 1..42: note = Probe
  source 1..42: mol_type = other DNA

SEQ ID NO: 50835 - DNA, 20 bp, synthetic construct
  misc_feature 1..20: note = Probe
  source 1..20: mol_type = other DNA
tgcaactccaaataaaagta

SEQ ID NO: 50836 - DNA, 23 bp, synthetic construct
  misc_feature 1..23: note = Probe
  source 1..23: mol_type = other DNA
tgcacactactataaccacccta

SEQ ID NO: 50837 - DNA, 39 bp, synthetic construct; identical to SEQ ID NO: 8084
  misc_feature 1..39: note = Probe
  source 1..39: mol_type = other DNA

SEQ ID NO: 50838 - DNA, 39 bp, synthetic construct; identical to SEQ ID NO: 24242
  misc_feature 1..39: note = Probe
  source 1..39: mol_type = other DNA

SEQ ID NO: 50839 - DNA, 39 bp, synthetic construct; identical to SEQ ID NO: 8085
  misc_feature 1..39: note = Probe
  source 1..39: mol_type = other DNA

SEQ ID NO: 50840 - DNA, 25 bp, synthetic construct
  misc_feature 1..25: note = Probe
  source 1..25: mol_type = other DNA
tgcacgcgtgggttcgaatcccatc

SEQ ID NO: 50841 - DNA, 29 bp, synthetic construct
  misc_feature 1..29: note = Probe
  source 1..29: mol_type = other DNA
tgcacgcgtgggttcgaatcccatcctcg

SEQ ID NO: 50842 - DNA, 30 bp, synthetic construct; identical to SEQ ID NO: 24246
  misc_feature 1..30: note = Probe
  source 1..30: mol_type = other DNA

SEQ ID NO: 50843 - DNA, 32 bp, synthetic construct
  misc_feature 1..32: note = Probe
  source 1..32: mol_type = other DNA
tgcacgcgtgggttcgaatcccatcctcgtcg

SEQ ID NO: 50844 - DNA, 29 bp, synthetic construct
  misc_feature 1..29: note = Probe
  source 1..29: mol_type = other DNA
tgcagagtggggttttgcagtccttagct

SEQ ID NO: 50845 - DNA, 26 bp, synthetic construct
  misc_feature 1..26: note = Probe
  source 1..26: mol_type = other DNA
tgcaggttcgagtcctgccgcggtcg

SEQ ID NO: 50846 - DNA, 39 bp, synthetic construct; identical to SEQ ID NO: 8088
  misc_feature 1..39: note = Probe
  source 1..39: mol_type = other DNA

SEQ ID NO: 50847 - DNA, 32 bp, synthetic construct
  misc_feature 1..32: note = Probe
  source 1..32: mol_type = other DNA
tgcatgggtggttcagtggtagaattctcgcc

SEQ ID NO: 50848 - DNA, 33 bp, synthetic construct; identical to SEQ ID NO: 8089
  misc_feature 1..33: note = Probe
  source 1..33: mol_type = other DNA

SEQ ID NO: 50849 - DNA, 17 bp, synthetic construct
  misc_feature 1..17: note = Probe
  source 1..17: mol_type = other DNA
tgccacgcgggaggccc

SEQ ID NO: 50850 - DNA, 43 bp, synthetic construct; identical to SEQ ID NO: 24254
  misc_feature 1..43: note = Probe
  source 1..43: mol_type = other DNA

SEQ ID NO: 50851 - DNA, 43 bp, synthetic construct; identical to SEQ ID NO: 24255
  misc_feature 1..43: note = Probe
  source 1..43: mol_type = other DNA

SEQ ID NO: 50852 - DNA, 16 bp, synthetic construct
  misc_feature 1..16: note = Probe
  source 1..16: mol_type = other DNA
tgccatgttaacgttt

SEQ ID NO: 50853 - DNA, 27 bp, synthetic construct
  misc_feature 1..27: note = Probe
  source 1..27: mol_type = other DNA
tgccccaactaaatactaccgtatggc

SEQ ID NO: 50854 - DNA, 16 bp, synthetic construct
  misc_feature 1..16: note = Probe
  source 1..16: mol_type = other DNA
tgcccccatgtctaac

SEQ ID NO: 50855 - DNA, 17 bp, synthetic construct
  misc_feature 1..17: note = Probe
  source 1..17: mol_type = other DNA
tgcccccatgtctaaca

SEQ ID NO: 50856 - DNA, 18 bp, synthetic construct
  misc_feature 1..18: note = Probe
  source 1..18: mol_type = other DNA
tgcccccatgtctaacaa

SEQ ID NO: 50857 - DNA, 19 bp, synthetic construct
  misc_feature 1..19: note = Probe
  source 1..19: mol_type = other DNA
tgcccccatgtctaacaac

SEQ ID NO: 50858 - DNA, 20 bp, synthetic construct
  misc_feature 1..20: note = Probe
  source 1..20: mol_type = other DNA
tgcccccatgtctaacaaca

SEQ ID NO: 50859 - DNA, 21 bp, synthetic construct
  misc_feature 1..21: note = Probe
  source 1..21: mol_type = other DNA
tgcccccatgtctaacaacat

SEQ ID NO: 50860 - DNA, 23 bp, synthetic construct
  misc_feature 1..23: note = Probe
  source 1..23: mol_type = other DNA
tgcccccatgtctaacaacatgg

SEQ ID NO: 50861 - DNA, 24 bp, synthetic construct
  misc_feature 1..24: note = Probe
  source 1..24: mol_type = other DNA
tgcccccatgtctaacaacatggc

SEQ ID NO: 50862 - DNA, 25 bp, synthetic construct
  misc_feature 1..25: note = Probe
  source 1..25: mol_type = other DNA
tgcccccatgtctaacaacatggct

SEQ ID NO: 50863 - DNA, 26 bp, synthetic construct
  misc_feature 1..26: note = Probe
  source 1..26: mol_type = other DNA
tgcccccatgtctaacaacatggctt

SEQ ID NO: 50864 - DNA, 27 bp, synthetic construct
  misc_feature 1..27: note = Probe
  source 1..27: mol_type = other DNA
tgcccccatgtctaacaacatggcttt

SEQ ID NO: 50865 - DNA, 28 bp, synthetic construct
  misc_feature 1..28: note = Probe
  source 1..28: mol_type = other DNA
tgcccccatgtctaacaacatggctttc

SEQ ID NO: 50866 - DNA, 29 bp, synthetic construct
  misc_feature 1..29: note = Probe
  source 1..29: mol_type = other DNA
tgcccccatgtctaacaacatggctttct

SEQ ID NO: 50867 - DNA, 30 bp, synthetic construct; identical to SEQ ID NO: 8103
  misc_feature 1..30: note = Probe
  source 1..30: mol_type = other DNA

SEQ ID NO: 50868 - DNA, 31 bp, synthetic construct; identical to SEQ ID NO: 8104
  misc_feature 1..31: note = Probe
  source 1..31: mol_type = other DNA

SEQ ID NO: 50869 - DNA, 32 bp, synthetic construct; identical to SEQ ID NO: 8105
  misc_feature 1..32: note = Probe
  source 1..32: mol_type = other DNA

SEQ ID NO: 50870 - DNA, 33 bp, synthetic construct; identical to SEQ ID NO: 8106
  misc_feature 1..33: note = Probe
  source 1..33: mol_type = other DNA

SEQ ID NO: 50871 - DNA, 34 bp, synthetic construct; identical to SEQ ID NO: 8107
  misc_feature 1..34: note = Probe
  source 1..34: mol_type = other DNA

SEQ ID NO: 50872 - DNA, 35 bp, synthetic construct; identical to SEQ ID NO: 24277
  misc_feature 1..35: note = Probe
  source 1..35: mol_type = other DNA

SEQ ID NO: 50873 - DNA, 38 bp, synthetic construct; identical to SEQ ID NO: 24278
  misc_feature 1..38: note = Probe
  source 1..38: mol_type = other DNA

SEQ ID NO: 50874 - DNA, 28 bp, synthetic construct
  misc_feature 1..28: note = Probe
  source 1..28: mol_type = other DNA
tgcccctcatttacataaatattatact

SEQ ID NO: 50875 - DNA, 29 bp, synthetic construct
  misc_feature 1..29: note = Probe
  source 1..29: mol_type = other DNA
tgcccctcatttacataaatattatacta

SEQ ID NO: 50876 - DNA, 17 bp, synthetic construct
  misc_feature 1..17: note = Probe
  source 1..17: mol_type = other DNA
tgcccgcatcctccact

SEQ ID NO: 50877 - DNA, 18 bp, synthetic construct
  misc_feature 1..18: note = Probe
  source 1..18: mol_type = other DNA
tgcccgcatcctccactc

SEQ ID NO: 50878 - DNA, 34 bp, synthetic construct; identical to SEQ ID NO: 8110
  misc_feature 1..34: note = Probe
  source 1..34: mol_type = other DNA

SEQ ID NO: 50879 - DNA, 35 bp, synthetic construct
  misc_feature 1..35: note = Probe
  source 1..35: mol_type = other DNA
tgccgaggttgtgagttcgagcctcacctggagca

SEQ ID NO: 50880 - DNA, 33 bp, synthetic construct
  misc_feature 1..33: note = Probe
  source 1..33: mol_type = other DNA
tgccgaggttgtgagttcgatcctcacctggag

SEQ ID NO: 50881 - DNA, 16 bp, synthetic construct
  misc_feature 1..16: note = Probe
  source 1..16: mol_type = other DNA
tgccgtgatcgtatag

SEQ ID NO: 50882 - DNA, 17 bp, synthetic construct
  misc_feature 1..17: note = Probe
  source 1..17: mol_type = other DNA
tgccgtgatcgtatagt

SEQ ID NO: 50883 - DNA, 18 bp, synthetic construct
  misc_feature 1..18: note = Probe
  source 1..18: mol_type = other DNA
tgccgtgatcgtatagtg

SEQ ID NO: 50884 - DNA, 19 bp, synthetic construct
  misc_feature 1..19: note = Probe
  source 1..19: mol_type = other DNA
tgccgtgatcgtatagtgg

SEQ ID NO: 50885 - DNA, 20 bp, synthetic construct
  misc_feature 1..20: note = Probe
  source 1..20: mol_type = other DNA
tgccgtgatcgtatagtggt

SEQ ID NO: 50886 - DNA, 21 bp, synthetic construct
  misc_feature 1..21: note = Probe
  source 1..21: mol_type = other DNA
tgccgtgatcgtatagtggtt

SEQ ID NO: 50887 - DNA, 22 bp, synthetic construct
  misc_feature 1..22: note = Probe
  source 1..22: mol_type = other DNA
tgccgtgatcgtatagtggtta

SEQ ID NO: 50888 - DNA, 23 bp, synthetic construct
  misc_feature 1..23: note = Probe
  source 1..23: mol_type = other DNA
tgccgtgatcgtatagtggttag

SEQ ID NO: 50889 - DNA, 24 bp, synthetic construct
  misc_feature 1..24: note = Probe
  source 1..24: mol_type = other DNA
tgccgtgatcgtatagtggttagt

SEQ ID NO: 50890 - DNA, 25 bp, synthetic construct
  misc_feature 1..25: note = Probe
  source 1..25: mol_type = other DNA
tgccgtgatcgtatagtggttagta

SEQ ID NO: 50891 - DNA, 27 bp, synthetic construct
  misc_feature 1..27: note = Probe
  source 1..27: mol_type = other DNA
tgccgtgatcgtatagtggttagtact

SEQ ID NO: 50892 - DNA, 28 bp, synthetic construct
  misc_feature 1..28: note = Probe
  source 1..28: mol_type = other DNA
tgccgtgatcgtatagtggttagtactc

SEQ ID NO: 50893 - DNA, 31 bp, synthetic construct; identical to SEQ ID NO: 8115
  misc_feature 1..31: note = Probe
  source 1..31: mol_type = other DNA

SEQ ID NO: 50894 - DNA, 32 bp, synthetic construct; identical to SEQ ID NO: 8116
  misc_feature 1..32: note = Probe
  source 1..32: mol_type = other DNA

SEQ ID NO: 50895 - DNA, 33 bp, synthetic construct; identical to SEQ ID NO: 1754
  misc_feature 1..33: note = Probe
  source 1..33: mol_type = other DNA

SEQ ID NO: 50896 - DNA, 34 bp, synthetic construct; identical to SEQ ID NO: 8117
  misc_feature 1..34: note = Probe
  source 1..34: mol_type = other DNA

SEQ ID NO: 50897 - DNA, 35 bp, synthetic construct; identical to SEQ ID NO: 1755
  misc_feature 1..35: note = Probe
  source 1..35: mol_type = other DNA

SEQ ID NO: 50898 - DNA, 36 bp, synthetic construct; identical to SEQ ID NO: 1756
  misc_feature 1..36: note = Probe
  source 1..36: mol_type = other DNA

SEQ ID NO: 50899 - DNA, 37 bp, synthetic construct; identical to SEQ ID NO: 1757
  misc_feature 1..37: note = Probe
  source 1..37: mol_type = other DNA

SEQ ID NO: 50900 - DNA, 39 bp, synthetic construct
  misc_feature 1..39: note = Probe
  source 1..39: mol_type = other DNA
tgccgtgatcgtatagtggttagtactctgcgttgtggc

SEQ ID NO: 50901 - DNA, 40 bp, synthetic construct; identical to SEQ ID NO: 24303
  misc_feature 1..40: note = Probe
  source 1..40: mol_type = other DNA

SEQ ID NO: 50902 - DNA, 42 bp, synthetic construct
  misc_feature 1..42: note = Probe
  source 1..42: mol_type = other DNA
tgccgtgatcgtatagtggttagtactctgcgttgtggccgc

SEQ ID NO: 50903 - DNA, 50 bp, synthetic construct; identical to SEQ ID NO: 35021
  misc_feature 1..50: note = Probe
  source 1..50: mol_type = other DNA

SEQ ID NO: 50904 - DNA, 21 bp, synthetic construct
  misc_feature 1..21: note = Probe
  source 1..21: mol_type = other DNA
tgcgaaactactttcttgatt

SEQ ID NO: 50905 - DNA, 23 bp, synthetic construct
  misc_feature 1..23: note = Probe
  source 1..23: mol_type = other DNA
tgcgaaactactttcttgattca

SEQ ID NO: 50906 - DNA, 33 bp, synthetic construct; identical to SEQ ID NO: 14385
  misc_feature 1..33: note = Probe
  source 1..33: mol_type = other DNA

SEQ ID NO: 50907 - DNA, 36 bp, synthetic construct; identical to SEQ ID NO: 24311
  misc_feature 1..36: note = Probe
  source 1..36: mol_type = other DNA

SEQ ID NO: 50908 - DNA, 37 bp, synthetic construct; identical to SEQ ID NO: 14386
  misc_feature 1..37: note = Probe
  source 1..37: mol_type = other DNA

SEQ ID NO: 50909 - DNA, 39 bp, synthetic construct; identical to SEQ ID NO: 8121
  misc_feature 1..39: note = Probe
  source 1..39: mol_type = other DNA

SEQ ID NO: 50910 - DNA, 29 bp, synthetic construct
  misc_feature 1..29: note = Probe
  source 1..29: mol_type = other DNA
tgcgtgttcaaatcacgtcggggtcaaca

SEQ ID NO: 50911 - DNA, 26 bp, synthetic construct
  misc_feature 1..26: note = Probe
  source 1..26: mol_type = other DNA
tgcgtgttcaagtcacgtcggggtca

SEQ ID NO: 50912 - DNA, 42 bp, synthetic construct; identical to SEQ ID NO: 24314
  misc_feature 1..42: note = Probe
  source 1..42: mol_type = other DNA

SEQ ID NO: 50913 - DNA, 36 bp, synthetic construct; identical to SEQ ID NO: 8127
  misc_feature 1..36: note = Probe
  source 1..36: mol_type = other DNA

SEQ ID NO: 50914 - DNA, 42 bp, synthetic construct; identical to SEQ ID NO: 24325
  misc_feature 1..42: note = Probe
  source 1..42: mol_type = other DNA

SEQ ID NO: 50915 - DNA, 43 bp, synthetic construct; identical to SEQ ID NO: 8133
  misc_feature 1..43: note = Probe
  source 1..43: mol_type = other DNA

SEQ ID NO: 50916 - DNA, 44 bp, synthetic construct; identical to SEQ ID NO: 8134
  misc_feature 1..44: note = Probe
  source 1..44: mol_type = other DNA

SEQ ID NO: 50917 - DNA, 50 bp, synthetic construct
  misc_feature 1..50: note = Probe
  source 1..50: mol_type = other DNA
tgctaataacgccaaggtcgcgggttcgatccccgtacgggccactggat

SEQ ID NO: 50918 - DNA, 50 bp, synthetic construct; identical to SEQ ID NO: 42078
  misc_feature 1..50: note = Probe
  source 1..50: mol_type = other DNA

SEQ ID NO: 50919 - DNA, 17 bp, synthetic construct
  misc_feature 1..17: note = Probe
  source 1..17: mol_type = other DNA
tgctaatccattgtgct

SEQ ID NO: 50920 - DNA, 17 bp, synthetic construct
  misc_feature 1..17: note = Probe
  source 1..17: mol_type = other DNA
tgctaatggtggagtta

SEQ ID NO: 50921 - DNA, 21 bp, synthetic construct
  misc_feature 1..21: note = Probe
  source 1..21: mol_type = other DNA
tgctaatggtggagttaaaga

SEQ ID NO: 50922 - DNA, 33 bp, synthetic construct; identical to SEQ ID NO: 1758
  misc_feature 1..33: note = Probe
  source 1..33: mol_type = other DNA

SEQ ID NO: 50923 - DNA, 36 bp, synthetic construct; identical to SEQ ID NO: 8139
  misc_feature 1..36: note = Probe
  source 1..36: mol_type = other DNA

SEQ ID NO: 50924 - DNA, 37 bp, synthetic construct
  misc_feature 1..37: note = Probe
  source 1..37: mol_type = other DNA
tgctaatggtggagttaaagactttttctctgatttg

SEQ ID NO: 50925 - DNA, 38 bp, synthetic construct; identical to SEQ ID NO: 8140
  misc_feature 1..38: note = Probe
  source 1..38: mol_type = other DNA

SEQ ID NO: 50926 - DNA, 39 bp, synthetic construct; identical to SEQ ID NO: 8141
  misc_feature 1..39: note = Probe
  source 1..39: mol_type = other DNA

SEQ ID NO: 50927 - DNA, 40 bp, synthetic construct; identical to SEQ ID NO: 8142
  misc_feature 1..40: note = Probe
  source 1..40: mol_type = other DNA

SEQ ID NO: 50928 - DNA, 41 bp, synthetic construct; identical to SEQ ID NO: 8143
  misc_feature 1..41: note = Probe
  source 1..41: mol_type = other DNA

SEQ ID NO: 50929 - DNA, 42 bp, synthetic construct; identical to SEQ ID NO: 8144
  misc_feature 1..42: note = Probe
  source 1..42: mol_type = other DNA

SEQ ID NO: 50930 - DNA, 43 bp, synthetic construct; identical to SEQ ID NO: 8145
  misc_feature 1..43: note = Probe
  source 1..43: mol_type = other DNA

SEQ ID NO: 50931 - DNA, 44 bp, synthetic construct; identical to SEQ ID NO: 8146
  misc_feature 1..44: note = Probe
  source 1..44: mol_type = other DNA

SEQ ID NO: 50932 - DNA, 45 bp, synthetic construct; identical to SEQ ID NO: 8147
  misc_feature 1..45: note = Probe
  source 1..45: mol_type = other DNA

SEQ ID NO: 50933 - DNA, 46 bp, synthetic construct; identical to SEQ ID NO: 8148
  misc_feature 1..46: note = Probe
  source 1..46: mol_type = other DNA

SEQ ID NO: 50934 - DNA, 25 bp, synthetic construct
  misc_feature 1..25: note = Probe
  source 1..25: mol_type = other DNA
tggagttaaagactttttctctgat

SEQ ID NO: 50935 - DNA, 27 bp, synthetic construct
  misc_feature 1..27: note = Probe
  source 1..27: mol_type = other DNA
tggagttaaagactttttctctgattt

SEQ ID NO: 50936 - DNA, 26 bp, synthetic construct
  misc_feature 1..26: note = Probe
  source 1..26: mol_type = other DNA
tggatcgaaaccatcctctgctaggt

SEQ ID NO: 50937 - DNA, 21 bp, synthetic construct
  misc_feature 1..21: note = Probe
  source 1..21: mol_type = other DNA
tggccaacctcctactcctca

SEQ ID NO: 50938 - DNA, 27 bp, synthetic construct
  misc_feature 1..27: note = Probe
  source 1..27: mol_type = other DNA
tggcccgggttcgactcccggtatggg

SEQ ID NO: 50939 - DNA, 28 bp, synthetic construct
  misc_feature 1..28: note = Probe
  source 1..28: mol_type = other DNA
tggcccgggttcgactcccggtatggga

SEQ ID NO: 50940 - DNA, 29 bp, synthetic construct
  misc_feature 1..29: note = Probe
  source 1..29: mol_type = other DNA
tggcccgggttcgactcccggtatgggaa

SEQ ID NO: 50941 - DNA, 30 bp, synthetic construct; identical to SEQ ID NO: 24347
  misc_feature 1..30: note = Probe
  source 1..30: mol_type = other DNA

SEQ ID NO: 50942 - DNA, 32 bp, synthetic construct; identical to SEQ ID NO: 8153
  misc_feature 1..32: note = Probe
  source 1..32: mol_type = other DNA

SEQ ID NO: 50943 - DNA, 23 bp, synthetic construct
  misc_feature 1..23: note = Probe
  source 1..23: mol_type = other DNA
tggccgcagcaacctcggttcga

SEQ ID NO: 50944 - DNA, 49 bp, synthetic construct
  misc_feature 1..49: note = Probe
  source 1..49: mol_type = other DNA
tgggcccataacccagaggtcgatggatcgaaaccatcctctgctaggt

SEQ ID NO: 50945 - DNA, 50 bp, synthetic construct; identical to SEQ ID NO: 8156
  misc_feature 1..50: note = Probe
  source 1..50: mol_type = other DNA

SEQ ID NO: 50946 - DNA, 48 bp, synthetic construct
  misc_feature 1..48: note = Probe
  source 1..48: mol_type = other DNA
tgggcccataacccagaggtcgatggatcgaaaccatcctctgctatc

SEQ ID NO: 50947 - DNA, 29 bp, synthetic construct
  misc_feature 1..29: note = Probe
  source 1..29: mol_type = other DNA
tggggattgtgggttcgagtcccatctgg

SEQ ID NO: 50948 - DNA, 33 bp, synthetic construct
  misc_feature 1..33: note = Probe
  source 1..33: mol_type = other DNA
tgggggtatagctcagtggtagagcatttgact

SEQ ID NO: 50949 - DNA, 40 bp, synthetic construct; identical to SEQ ID NO: 8164
  misc_feature 1..40: note = Probe
  source 1..40: mol_type = other DNA

SEQ ID NO: 50950 - DNA, 20 bp, synthetic construct
  misc_feature 1..20: note = Probe
  source 1..20: mol_type = other DNA
tggtagaattctcgcctgcc

SEQ ID NO: 50951 - DNA, 33 bp, synthetic construct; identical to SEQ ID NO: 1768
  misc_feature 1..33: note = Probe
  source 1..33: mol_type = other DNA

SEQ ID NO: 50952 - DNA, 28 bp, synthetic construct
  misc_feature 1..28: note = Probe
  source 1..28: mol_type = other DNA
tggtatatagtttaaacaaaacgaatga

SEQ ID NO: 50953 - DNA, 36 bp, synthetic construct; identical to SEQ ID NO: 1771
  misc_feature 1..36: note = Probe
  source 1..36: mol_type = other DNA

SEQ ID NO: 50954 - DNA, 37 bp, synthetic construct; identical to SEQ ID NO: 1772
  misc_feature 1..37: note = Probe
  source 1..37: mol_type = other DNA

SEQ ID NO: 50955 - DNA, 50 bp, synthetic construct; identical to SEQ ID NO: 1773
  misc_feature 1..50: note = Probe
  source 1..50: mol_type = other DNA

SEQ ID NO: 50956 - DNA, 22 bp, synthetic construct
  misc_feature 1..22: note = Probe
  source 1..22: mol_type = other DNA
tggtcctagcctttctattagc

SEQ ID NO: 50957 - DNA, 22 bp, synthetic construct
  misc_feature 1..22: note = Probe
  source 1..22: mol_type = other DNA
tggtcgtggttgtagtccgtgc

SEQ ID NO: 50958 - DNA, 28 bp, synthetic construct
  misc_feature 1..28: note = Probe
  source 1..28: mol_type = other DNA
tggtcgtggttgtagtccgtgcgagaat

SEQ ID NO: 50959 - DNA, 29 bp, synthetic construct
  misc_feature 1..29: note = Probe
  source 1..29: mol_type = other DNA
tggtcgtggttgtagtccgtgcgagaata

SEQ ID NO: 50960 - DNA, 32 bp, synthetic construct; identical to SEQ ID NO: 8180
  misc_feature 1..32: note = Probe
  source 1..32: mol_type = other DNA

SEQ ID NO: 50961 - DNA, 16 bp, synthetic construct
  misc_feature 1..16: note = Probe
  source 1..16: mol_type = other DNA
tggtgagtatccccgc

SEQ ID NO: 50962 - DNA, 22 bp, synthetic construct
  misc_feature 1..22: note = Probe
  source 1..22: mol_type = other DNA
tggtgagtatccccgcctgtca

SEQ ID NO: 50963 - DNA, 35 bp, synthetic construct; identical to SEQ ID NO: 14415
  misc_feature 1..35: note = Probe
  source 1..35: mol_type = other DNA

SEQ ID NO: 50964 - DNA, 50 bp, synthetic construct
  misc_feature 1..50: note = Probe
  source 1..50: mol_type = other DNA
tggtgagtatccccgcctgtcacgcgggagaccggggttcgattccccga

SEQ ID NO: 50965 - DNA, 29 bp, synthetic construct
  misc_feature 1..29: note = Probe
  source 1..29: mol_type = other DNA
tggtggagttaaagactttttctctgatt

SEQ ID NO: 50966 - DNA, 30 bp, synthetic construct; identical to SEQ ID NO: 24420
  misc_feature 1..30: note = Probe
  source 1..30: mol_type = other DNA

SEQ ID NO: 50967 - DNA, 26 bp, synthetic construct
  misc_feature 1..26: note = Probe
  source 1..26: mol_type = other DNA
tggtggttcgagcccacccagggacg

SEQ ID NO: 50968 - DNA, 29 bp, synthetic construct
  misc_feature 1..29: note = Probe
  source 1..29: mol_type = other DNA
tggtggttcgagcccacccagggacgcct

SEQ ID NO: 50969 - DNA, 23 bp, synthetic construct
  misc_feature 1..23: note = Probe
  source 1..23: mol_type = other DNA
tggtgtagtggtatcatgcaaga

SEQ ID NO: 50970 - DNA, 41 bp, synthetic construct; identical to SEQ ID NO: 14425
  misc_feature 1..41: note = Probe
  source 1..41: mol_type = other DNA

SEQ ID NO: 50971 - DNA, 18 bp, synthetic construct
  misc_feature 1..18: note = Probe
  source 1..18: mol_type = other DNA
tggttaggattcggcgct

SEQ ID NO: 50972 - DNA, 19 bp, synthetic construct
  misc_feature 1..19: note = Probe
  source 1..19: mol_type = other DNA
tggttaggattcggcgctc

SEQ ID NO: 50973 - DNA, 22 bp, synthetic construct
  misc_feature 1..22: note = Probe
  source 1..22: mol_type = other DNA
tggttaggattcggcgctctca

SEQ ID NO: 50974 - DNA, 34 bp, synthetic construct; identical to SEQ ID NO: 14437
  misc_feature 1..34: note = Probe
  source 1..34: mol_type = other DNA

SEQ ID NO: 50975 - DNA, 16 bp, synthetic construct
  misc_feature 1..16: note = Probe
  source 1..16: mol_type = other DNA
tggttagtactctgcg

SEQ ID NO: 50976 - DNA, 26 bp, synthetic construct
  misc_feature 1..26: note = Probe
  source 1..26: mol_type = other DNA
tggttcagtggtagaattctcgcctg

SEQ ID NO: 50977 - DNA, 21 bp, synthetic construct
  misc_feature 1..21: note = Probe
  source 1..21: mol_type = other DNA
tggttcgagcccacccaggga

SEQ ID NO: 50978 - DNA, 26 bp, synthetic construct
  misc_feature 1..26: note = Probe
  source 1..26: mol_type = other DNA
tggttcgagcccacccagggacgcct

SEQ ID NO: 50979 - DNA, 23 bp, synthetic construct
  misc_feature 1..23: note = Probe
  source 1..23: mol_type = other DNA
tggttcgatcccgggtttcggca

SEQ ID NO: 50980 - DNA, 17 bp, synthetic construct
  misc_feature 1..17: note = Probe
  source 1..17: mol_type = other DNA
tggttgtagtccgtgcg

SEQ ID NO: 50981 - DNA, 21 bp, synthetic construct
  misc_feature 1..21: note = Probe
  source 1..21: mol_type = other DNA
tggttgtagtccgtgcgagaa

SEQ ID NO: 50982 - DNA, 26 bp, synthetic construct
  misc_feature 1..26: note = Probe
  source 1..26: mol_type = other DNA
tggttgtagtccgtgcgagaataatg

SEQ ID NO: 50983 - DNA, 37 bp, synthetic construct
  misc_feature 1..37: note = Probe
  source 1..37: mol_type = other DNA
tggtttttcatatcattggtcgtggttgtagtccgtg

SEQ ID NO: 50984 - DNA, 31 bp, synthetic construct
  misc_feature 1..31: note = Probe
  source 1..31: mol_type = other DNA
tgtaaaccggagatgaaaacctttttccaag

SEQ ID NO: 50985 - DNA, 37 bp, synthetic construct; identical to SEQ ID NO: 8221
  misc_feature 1..37: note = Probe
  source 1..37: mol_type = other DNA

SEQ ID NO: 50986 - DNA, 38 bp, synthetic construct; identical to SEQ ID NO: 8222
  misc_feature 1..38: note = Probe
  source 1..38: mol_type = other DNA

SEQ ID NO: 50987 - DNA, 43 bp, synthetic construct; identical to SEQ ID NO: 8233
  misc_feature 1..43: note = Probe
  source 1..43: mol_type = other DNA

SEQ ID NO: 50988 - DNA, 44 bp, synthetic construct; identical to SEQ ID NO: 8234
  misc_feature 1..44: note = Probe
  source 1..44: mol_type = other DNA

SEQ ID NO: 50989 - DNA, 45 bp, synthetic construct; identical to SEQ ID NO: 8235
  misc_feature 1..45: note = Probe
  source 1..45: mol_type = other DNA

SEQ ID NO: 50990 - DNA, 46 bp, synthetic construct; identical to SEQ ID NO: 8236
  misc_feature 1..46: note = Probe
  source 1..46: mol_type = other DNA

SEQ ID NO: 50991 - DNA, 50 bp, synthetic construct; identical to SEQ ID NO: 8238
  misc_feature 1..50: note = Probe
  source 1..50: mol_type = other DNA

SEQ ID NO: 50992 - DNA, 22 bp, synthetic construct
  misc_feature 1..22: note = Probe
  source 1..22: mol_type = other DNA
tgtagcggttatcacattcgcc

SEQ ID NO: 50993 - DNA, 22 bp, synthetic construct
  misc_feature 1..22: note = Probe
  source 1..22: mol_type = other DNA
tgtagtccgtgcgagaataatg

SEQ ID NO: 50994 - DNA, 18 bp, synthetic construct
  misc_feature 1..18: note = Probe
  source 1..18: mol_type = other DNA
tgtagtggttatcacgtt

SEQ ID NO: 50995 - DNA, 23 bp, synthetic construct
  misc_feature 1..23: note = Probe
  source 1..23: mol_type = other DNA
tgtagtggttatcacgttcgcct

SEQ ID NO: 50996 - DNA, 36 bp, synthetic construct; identical to SEQ ID NO: 24487
  misc_feature 1..36: note = Probe
  source 1..36: mol_type = other DNA

SEQ ID NO: 50997 - DNA, 38 bp, synthetic construct; identical to SEQ ID NO: 24489
  misc_feature 1..38: note = Probe
  source 1..38: mol_type = other DNA

SEQ ID NO: 50998 - DNA, 39 bp, synthetic construct; identical to SEQ ID NO: 24490
  misc_feature 1..39: note = Probe
  source 1..39: mol_type = other DNA

SEQ ID NO: 50999 - DNA, 39 bp, synthetic construct; identical to SEQ ID NO: 8248
  misc_feature 1..39: note = Probe
  source 1..39: mol_type = other DNA

SEQ ID NO: 51000 - DNA, 39 bp, synthetic construct; identical to SEQ ID NO: 24499
  misc_feature 1..39: note = Probe
  source 1..39: mol_type = other DNA

SEQ ID NO: 51001 - DNA, 18 bp, synthetic construct
  misc_feature 1..18: note = Probe
  source 1..18: mol_type = other DNA
tgtatgtctccatctatt

SEQ ID NO: 51002 - DNA, 30 bp, synthetic construct
  misc_feature 1..30: note = Probe
  source 1..30: mol_type = other DNA
tgtatgtctccatctattgatgagggtctt

SEQ ID NO: 51003 - DNA, 35 bp, synthetic construct
  misc_feature 1..35: note = Probe
  source 1..35: mol_type = other DNA
tgtatgtctccatctattgatgagggtcttactct

SEQ ID NO: 51004 - DNA, 44 bp, synthetic construct
  misc_feature 1..44: note = Probe
  source 1..44: mol_type = other DNA
tgtcaaagttaaattataggctaaatcctatatatcttaatggc

SEQ ID NO: 51005 - DNA, 22 bp, synthetic construct
  misc_feature 1..22: note = Probe
  source 1..22: mol_type = other DNA
tgtcacgcgggagaccggggtt

SEQ ID NO: 51006 - DNA, 37 bp, synthetic construct; identical to SEQ ID NO: 14448
  misc_feature 1..37: note = Probe
  source 1..37: mol_type = other DNA

SEQ ID NO: 51007 - DNA, 40 bp, synthetic construct; identical to SEQ ID NO: 14449
  misc_feature 1..40: note = Probe
  source 1..40: mol_type = other DNA

SEQ ID NO: 51008 - DNA, 43 bp, synthetic construct; identical to SEQ ID NO: 8254
  misc_feature 1..43: note = Probe
  source 1..43: mol_type = other DNA

SEQ ID NO: 51009 - DNA, 39 bp, synthetic construct; identical to SEQ ID NO: 24516
  misc_feature 1..39: note = Probe
  source 1..39: mol_type = other DNA

SEQ ID NO: 51010 - DNA, 41 bp, synthetic construct; identical to SEQ ID NO: 24517
  misc_feature 1..41: note = Probe
  source 1..41: mol_type = other DNA

SEQ ID NO: 51011 - DNA, 43 bp, synthetic construct; identical to SEQ ID NO: 24518
  misc_feature 1..43: note = Probe
  source 1..43: mol_type = other DNA

SEQ ID NO: 51012 - DNA, 50 bp, synthetic construct; identical to SEQ ID NO: 42149
  misc_feature 1..50: note = Probe
  source 1..50: mol_type = other DNA

SEQ ID NO: 51013 - DNA, 43 bp, synthetic construct; identical to SEQ ID NO: 8255
  misc_feature 1..43: note = Probe
  source 1..43: mol_type = other DNA

SEQ ID NO: 51014 - DNA, 41 bp, synthetic construct; identical to SEQ ID NO: 24521
  misc_feature 1..41: note = Probe
  source 1..41: mol_type = other DNA

SEQ ID NO: 51015 - DNA, 50 bp, synthetic construct; identical to SEQ ID NO: 8256
  misc_feature 1..50: note = Probe
  source 1..50: mol_type = other DNA

SEQ ID NO: 51016 - DNA, 43 bp, synthetic construct; identical to SEQ ID NO: 8257
  misc_feature 1..43: note = Probe
  source 1..43: mol_type = other DNA

SEQ ID NO: 51017 - DNA, 49 bp, synthetic construct; identical to SEQ ID NO: 8258
  misc_feature 1..49: note = Probe
  source 1..49: mol_type = other DNA

SEQ ID NO: 51018 - DNA, 50 bp, synthetic construct; identical to SEQ ID NO: 8259
  misc_feature 1..50: note = Probe
  source 1..50: mol_type = other DNA

SEQ ID NO: 51019 - DNA, 25 bp, synthetic construct
  misc_feature 1..25: note = Probe
  source 1..25: mol_type = other DNA
tgtctaacaacatggctttctcaac

SEQ ID NO: 51020 - DNA, 29 bp, synthetic construct
  misc_feature 1..29: note = Probe
  source 1..29: mol_type = other DNA
tgtgaatctgacaacagaggcttacgacc

SEQ ID NO: 51021 - DNA, 31 bp, synthetic construct; identical to SEQ ID NO: 8264
  misc_feature 1..31: note = Probe
  source 1..31: mol_type = other DNA

SEQ ID NO: 51022 - DNA, 40 bp, synthetic construct; identical to SEQ ID NO: 24531
  misc_feature 1..40: note = Probe
  source 1..40: mol_type = other DNA

SEQ ID NO: 51023 - DNA, 41 bp, synthetic construct; identical to SEQ ID NO: 8269
  misc_feature 1..41: note = Probe
  source 1..41: mol_type = other DNA

SEQ ID NO: 51024 - DNA, 42 bp, synthetic construct; identical to SEQ ID NO: 8270
  misc_feature 1..42: note = Probe
  source 1..42: mol_type = other DNA

SEQ ID NO: 51025 - DNA, 43 bp, synthetic construct; identical to SEQ ID NO: 8271
  misc_feature 1..43: note = Probe
  source 1..43: mol_type = other DNA

SEQ ID NO: 51026 - DNA, 28 bp, synthetic construct
  misc_feature 1..28: note = Probe
  source 1..28: mol_type = other DNA
tgtgagttcgagcctcacctggagcatt

SEQ ID NO: 51027 - DNA, 29 bp, synthetic construct
  misc_feature 1..29: note = Probe
  source 1..29: mol_type = other DNA
tgtgagttcgagcctcacctggagcattg

SEQ ID NO: 51028 - DNA, 21 bp, synthetic construct
  misc_feature 1..21: note = Probe
  source 1..21: mol_type = other DNA
tgtgctccggagttacctcgt

SEQ ID NO: 51029 - DNA, 22 bp, synthetic construct
  misc_feature 1..22: note = Probe
  source 1..22: mol_type = other DNA
tgtgctccggagttacctcgtt

SEQ ID NO: 51030 - DNA, 23 bp, synthetic construct
  misc_feature 1..23: note = Probe
  source 1..23: mol_type = other DNA
tgtgctccggagttacctcgttt

SEQ ID NO: 51031 - DNA, 24 bp, synthetic construct
  misc_feature 1..24: note = Probe
  source 1..24: mol_type = other DNA
tgtgctccggagttacctcgtttt

SEQ ID NO: 51032 - DNA, 26 bp, synthetic construct
  misc_feature 1..26: note = Probe
  source 1..26: mol_type = other DNA
tgtgggttcgagtcccatctggggtg

SEQ ID NO: 51033 - DNA, 27 bp, synthetic construct
  misc_feature 1..27: note = Probe
  source 1..27: mol_type = other DNA
tgtgggttcgagtcccatctggggtgg

SEQ ID NO: 51034 - DNA, 24 bp, synthetic construct
  misc_feature 1..24: note = Probe
  source 1..24: mol_type = other DNA
tgtgggttcgagtcccatctgggt

SEQ ID NO: 51035 - DNA, 25 bp, synthetic construct
  misc_feature 1..25: note = Probe
  source 1..25: mol_type = other DNA
tgtgggttcgagtcccatctgggtc

SEQ ID NO: 51036 - DNA, 26 bp, synthetic construct
  misc_feature 1..26: note = Probe
  source 1..26: mol_type = other DNA
tgtgggttcgagtcccatctgggtcg

SEQ ID NO: 51037 - DNA, 29 bp, synthetic construct
  misc_feature 1..29: note = Probe
  source 1..29: mol_type = other DNA
tgtgggttcgagtcccatctgggtcgcgt

SEQ ID NO: 51038 - DNA, 39 bp, synthetic construct
  misc_feature 1..39: note = Probe
  source 1..39: mol_type = other DNA
tgttaaccgaaaggttggtggttcgagcccacccaggga

SEQ ID NO: 51039 - DNA, 38 bp, synthetic construct; identical to SEQ ID NO: 24544
  misc_feature 1..38: note = Probe
  source 1..38: mol_type = other DNA

SEQ ID NO: 51040 - DNA, 39 bp, synthetic construct; identical to SEQ ID NO: 24545
  misc_feature 1..39: note = Probe
  source 1..39: mol_type = other DNA

SEQ ID NO: 51041 - DNA, 43 bp, synthetic construct; identical to SEQ ID NO: 8277
  misc_feature 1..43: note = Probe
  source 1..43: mol_type = other DNA

SEQ ID NO: 51042 - DNA, 44 bp, synthetic construct; identical to SEQ ID NO: 8278
  misc_feature 1..44: note = Probe
  source 1..44: mol_type = other DNA

SEQ ID NO: 51043 - DNA, 25 bp, synthetic construct
  misc_feature 1..25: note = Probe
  source 1..25: mol_type = other DNA
tgttcgaatcacgtcggggtcaaac

SEQ ID NO: 51044 - DNA, 17 bp, synthetic construct
  misc_feature 1..17: note = Probe
  source 1..17: mol_type = other DNA
tgtttagacgggctcac

SEQ ID NO: 51045 - DNA, 18 bp, synthetic construct
  misc_feature 1..18: note = Probe
  source 1..18: mol_type = other DNA
tgtttagacgggctcaca

SEQ ID NO: 51046 - DNA, 19 bp, synthetic construct
  misc_feature 1..19: note = Probe
  source 1..19: mol_type = other DNA
tgtttagacgggctcacat

SEQ ID NO: 51047 - DNA, 21 bp, synthetic construct
  misc_feature 1..21: note = Probe
  source 1..21: mol_type = other DNA
tgtttagacgggctcacatca

SEQ ID NO: 51048 - DNA, 26 bp, synthetic construct
  misc_feature 1..26: note = Probe
  source 1..26: mol_type = other DNA
tgtttagacgggctcacatcacccca

SEQ ID NO: 51049 - DNA, 28 bp, synthetic construct
  misc_feature 1..28: note = Probe
  source 1..28: mol_type = other DNA
tgtttagacgggctcacatcaccccata

SEQ ID NO: 51050 - DNA, 29 bp, synthetic construct
  misc_feature 1..29: note = Probe
  source 1..29: mol_type = other DNA
tgtttagacgggctcacatcaccccataa

SEQ ID NO: 51051 - DNA, 32 bp, synthetic construct
  misc_feature 1..32: note = Probe
  source 1..32: mol_type = other DNA
tgtttagacgggctcacatcaccccataaaca

SEQ ID NO: 51052 - DNA, 33 bp, synthetic construct
  misc_feature 1..33: note = Probe
  source 1..33: mol_type = other DNA
tgtttagacgggctcacatcaccccataaacaa

SEQ ID NO: 51053 - DNA, 34 bp, synthetic construct; identical to SEQ ID NO: 8288
  misc_feature 1..34: note = Probe
  source 1..34: mol_type = other DNA

SEQ ID NO: 51054 - DNA, 35 bp, synthetic construct; identical to SEQ ID NO: 8289
  misc_feature 1..35: note = Probe
  source 1..35: mol_type = other DNA

SEQ ID NO: 51055 - DNA, 29 bp, synthetic construct
  misc_feature 1..29: note = Probe
  source 1..29: mol_type = other DNA
tgtttgtgggtttaagtcccattggtcta

SEQ ID NO: 51056 - DNA, 31 bp, synthetic construct; identical to SEQ ID NO: 8293
  misc_feature 1..31: note = Probe
  source 1..31: mol_type = other DNA

SEQ ID NO: 51057 - DNA, 32 bp, synthetic construct; identical to SEQ ID NO: 8294
  misc_feature 1..32: note = Probe
  source 1..32: mol_type = other DNA

SEQ ID NO: 51058 - DNA, 40 bp, synthetic construct
  misc_feature 1..40: note = Probe
  source 1..40: mol_type = other DNA
ttaaaactttacagtcagaggttcaattcctcttcttaac

SEQ ID NO: 51059 - DNA, 38 bp, synthetic construct; identical to SEQ ID NO: 35380
  misc_feature 1..38: note = Probe
  source 1..38: mol_type = other DNA

SEQ ID NO: 51060 - DNA, 39 bp, synthetic construct; identical to SEQ ID NO: 8298
  misc_feature 1..39: note = Probe
  source 1..39: mol_type = other DNA

SEQ ID NO: 51061 - DNA, 31 bp, synthetic construct; identical to SEQ ID NO: 8301
  misc_feature 1..31: note = Probe
  source 1..31: mol_type = other DNA

SEQ ID NO: 51062 - DNA, 32 bp, synthetic construct; identical to SEQ ID NO: 8302
  misc_feature 1..32: note = Probe
  source 1..32: mol_type = other DNA

SEQ ID NO: 51063 - DNA, 33 bp, synthetic construct; identical to SEQ ID NO: 8303
  misc_feature 1..33: note = Probe
  source 1..33: mol_type = other DNA

SEQ ID NO: 51064 - DNA, 34 bp, synthetic construct; identical to SEQ ID NO: 8304
  misc_feature 1..34: note = Probe
  source 1..34: mol_type = other DNA

SEQ ID NO: 51065 - DNA, 49 bp, synthetic construct; identical to SEQ ID NO: 1784
  misc_feature 1..49: note = Probe
  source 1..49: mol_type = other DNA

SEQ ID NO: 51066 - DNA, 50 bp, synthetic construct; identical to SEQ ID NO: 1785
  misc_feature 1..50: note = Probe
  source 1..50: mol_type = other DNA

SEQ ID NO: 51067 - DNA, 34 bp, synthetic construct
  misc_feature 1..34: note = Probe
  source 1..34: mol_type = other DNA
ttaaccgaaaggttggtggttcgagcccacccag

SEQ ID NO: 51068 - DNA, 35 bp, synthetic construct
  misc_feature 1..35: note = Probe
  source 1..35: mol_type = other DNA
ttaaccgaaaggttggtggttcgagcccacccagg

SEQ ID NO: 51069 - DNA, 36 bp, synthetic construct; identical to SEQ ID NO: 25864
  misc_feature 1..36: note = Probe
  source 1..36: mol_type = other DNA

SEQ ID NO: 51070 - DNA, 38 bp, synthetic construct
  misc_feature 1..38: note = Probe
  source 1..38: mol_type = other DNA
ttaaccgaaaggttggtggttcgagcccacccagggac

SEQ ID NO: 51071 - DNA, 39 bp, synthetic construct
  misc_feature 1..39: note = Probe
  source 1..39: mol_type = other DNA
ttaaccgaaaggttggtggttcgagcccacccagggacg

SEQ ID NO: 51072 - DNA, 40 bp, synthetic construct; identical to SEQ ID NO: 8307
  misc_feature 1..40: note = Probe
  source 1..40: mol_type = other DNA

SEQ ID NO: 51073 - DNA, 41 bp, synthetic construct; identical to SEQ ID NO: 1787
  misc_feature 1..41: note = Probe
  source 1..41: mol_type = other DNA

SEQ ID NO: 51074 - DNA, 42 bp, synthetic construct; identical to SEQ ID NO: 35397
  misc_feature 1..42: note = Probe
  source 1..42: mol_type = other DNA

SEQ ID NO: 51075 - DNA, 50 bp, synthetic construct
  misc_feature 1..50: note = Probe
  source 1..50: mol_type = other DNA
ttaaccgaaaggttggtggttcgagcccacccagggacgcctctttgagc

SEQ ID NO: 51076 - DNA, 41 bp, synthetic construct; identical to SEQ ID NO: 8308
  misc_feature 1..41: note = Probe
  source 1..41: mol_type = other DNA

SEQ ID NO: 51077 - DNA, 41 bp, synthetic construct; identical to SEQ ID NO: 8309
  misc_feature 1..41: note = Probe
  source 1..41: mol_type = other DNA

SEQ ID NO: 51078 - DNA, 40 bp, synthetic construct
  misc_feature 1..40: note = Probe
  source 1..40: mol_type = other DNA
ttaaccgaaaggttggtggttcgagcccacccagggacgg

SEQ ID NO: 51079 - DNA, 41 bp, synthetic construct
  misc_feature 1..41: note = Probe
  source 1..41: mol_type = other DNA
ttaaccgaaaggttggtggttcgagcccacccagggacggt

SEQ ID NO: 51080 - DNA, 37 bp, synthetic construct
  misc_feature 1..37: note = Probe
  source 1..37: mol_type = other DNA
ttaaccgaaaggttggtggttcgatcccacccaggga

SEQ ID NO: 51081 - DNA, 49 bp, synthetic construct; identical to SEQ ID NO: 8310
  misc_feature 1..49: note = Probe
  source 1..49: mol_type = other DNA

SEQ ID NO: 51082 - DNA, 50 bp, synthetic construct; identical to SEQ ID NO: 8311
  misc_feature 1..50: note = Probe
  source 1..50: mol_type = other DNA

SEQ ID NO: 51083 - DNA, 32 bp, synthetic construct; identical to SEQ ID NO: 8314
  misc_feature 1..32: note = Probe
  source 1..32: mol_type = other DNA

SEQ ID NO: 51084 - DNA, 34 bp, synthetic construct; identical to SEQ ID NO: 8315
  misc_feature 1..34: note = Probe
  source 1..34: mol_type = other DNA

SEQ ID NO: 51085 - DNA, 39 bp, synthetic construct; identical to SEQ ID NO: 8316
  misc_feature 1..39: note = Probe
  source 1..39: mol_type = other DNA

SEQ ID NO: 51086 - DNA, 40 bp, synthetic construct; identical to SEQ ID NO: 8317
  misc_feature 1..40: note = Probe
  source 1..40: mol_type = other DNA

SEQ ID NO: 51087 - DNA, 41 bp, synthetic construct; identical to SEQ ID NO: 8318
  misc_feature 1..41: note = Probe
  source 1..41: mol_type = other DNA

SEQ ID NO: 51088 - DNA, 42 bp, synthetic construct; identical to SEQ ID NO: 8319
  misc_feature 1..42: note = Probe
  source 1..42: mol_type = other DNA

SEQ ID NO: 51089 - DNA, 20 bp, synthetic construct
  misc_feature 1..20: note = Probe
  source 1..20: mol_type = other DNA
ttaacttgaccgctctgagc

SEQ ID NO: 51090 - DNA, 21 bp, synthetic construct
  misc_feature 1..21: note = Probe
  source 1..21: mol_type = other DNA
ttaacttgaccgctctgagct

SEQ ID NO: 51091 - DNA, 32 bp, synthetic construct; identical to SEQ ID NO: 8326
  misc_feature 1..32: note = Probe
  source 1..32: mol_type = other DNA

SEQ ID NO: 51092 - DNA, 44 bp, synthetic construct; identical to SEQ ID NO: 8328
  misc_feature 1..44: note = Probe
  source 1..44: mol_type = other DNA

SEQ ID NO: 51093 - DNA, 44 bp, synthetic construct; identical to SEQ ID NO: 8329
  misc_feature 1..44: note = Probe
  source 1..44: mol_type = other DNA

SEQ ID NO: 51094 - DNA, 31 bp, synthetic construct; identical to SEQ ID NO: 8332
  misc_feature 1..31: note = Probe
  source 1..31: mol_type = other DNA

SEQ ID NO: 51095 - DNA, 32 bp, synthetic construct; identical to SEQ ID NO: 35447
  misc_feature 1..32: note = Probe
  source 1..32: mol_type = other DNA

SEQ ID NO: 51096 - DNA, 33 bp, synthetic construct; identical to SEQ ID NO: 8333
  misc_feature 1..33: note = Probe
  source 1..33: mol_type = other DNA

SEQ ID NO: 51097 - DNA, 34 bp, synthetic construct
  misc_feature 1..34: note = Probe
  source 1..34: mol_type = other DNA
ttacacttaggagatttcaacttaacttgaccgc

SEQ ID NO: 51098 - DNA, 35 bp, synthetic construct; identical to SEQ ID NO: 8334
  misc_feature 1..35: note = Probe
  source 1..35: mol_type = other DNA

SEQ ID NO: 51099 - DNA, 36 bp, synthetic construct; identical to SEQ ID NO: 35449
  misc_feature 1..36: note = Probe
  source 1..36: mol_type = other DNA

SEQ ID NO: 51100 - DNA, 37 bp, synthetic construct; identical to SEQ ID NO: 8335
  misc_feature 1..37: note = Probe
  source 1..37: mol_type = other DNA

SEQ ID NO: 51101 - DNA, 40 bp, synthetic construct; identical to SEQ ID NO: 8337
  misc_feature 1..40: note = Probe
  source 1..40: mol_type = other DNA

SEQ ID NO: 51102 - DNA, 41 bp, synthetic construct; identical to SEQ ID NO: 8338
  misc_feature 1..41: note = Probe
  source 1..41: mol_type = other DNA

SEQ ID NO: 51103 - DNA, 42 bp, synthetic construct; identical to SEQ ID NO: 8339
  misc_feature 1..42: note = Probe
  source 1..42: mol_type = other DNA

SEQ ID NO: 51104 - DNA, 43 bp, synthetic construct; identical to SEQ ID NO: 8340
  misc_feature 1..43: note = Probe
  source 1..43: mol_type = other DNA

SEQ ID NO: 51105 - DNA, 27 bp, synthetic construct
  misc_feature 1..27: note = Probe
  source 1..27: mol_type = other DNA
ttacagtcagaggttcaattcctcttc

SEQ ID NO: 51106 - DNA, 28 bp, synthetic construct
  misc_feature 1..28: note = Probe
  source 1..28: mol_type = other DNA
ttacagtcagaggttcaattcctcttct

SEQ ID NO: 51107 - DNA, 35 bp, synthetic construct
  misc_feature 1..35: note = Probe
  source 1..35: mol_type = other DNA
ttactttgatagagtaaataataggagcttaaacc

SEQ ID NO: 51108 - DNA, 36 bp, synthetic construct; identical to SEQ ID NO: 24605
  misc_feature 1..36: note = Probe
  source 1..36: mol_type = other DNA

SEQ ID NO: 51109 - DNA, 37 bp, synthetic construct; identical to SEQ ID NO: 8347
  misc_feature 1..37: note = Probe
  source 1..37: mol_type = other DNA

SEQ ID NO: 51110 - DNA, 40 bp, synthetic construct
  misc_feature 1..40: note = Probe
  source 1..40: mol_type = other DNA
ttactttgatagagtaaataataggagcttaaaccccctt

SEQ ID NO: 51111 - DNA, 41 bp, synthetic construct; identical to SEQ ID NO: 24609
  misc_feature 1..41: note = Probe
  source 1..41: mol_type = other DNA

SEQ ID NO: 51112 - DNA, 46 bp, synthetic construct
  misc_feature 1..46: note = Probe
  source 1..46: mol_type = other DNA
ttactttgatagagtaaataataggagcttaaacccccttatttct

SEQ ID NO: 51113 - DNA, 25 bp, synthetic construct
  misc_feature 1..25: note = Probe
  source 1..25: mol_type = other DNA
ttagacgggctcacatcaccccata

SEQ ID NO: 51114 - DNA, 26 bp, synthetic construct
  misc_feature 1..26: note = Probe
  source 1..26: mol_type = other DNA
ttagacgggctcacatcaccccataa

SEQ ID NO: 51115 - DNA, 29 bp, synthetic construct
  misc_feature 1..29: note = Probe
  source 1..29: mol_type = other DNA
ttagacgggctcacatcaccccataaaca

SEQ ID NO: 51116 - DNA, 30 bp, synthetic construct; identical to SEQ ID NO: 8357
  misc_feature 1..30: note = Probe
  source 1..30: mol_type = other DNA

SEQ ID NO: 51117 - DNA, 31 bp, synthetic construct; identical to SEQ ID NO: 8358
  misc_feature 1..31: note = Probe
  source 1..31: mol_type = other DNA

SEQ ID NO: 51118 - DNA, 32 bp, synthetic construct; identical to SEQ ID NO: 8359
  misc_feature 1..32: note = Probe
  source 1..32: mol_type = other DNA

SEQ ID NO: 51119 - DNA, 37 bp, synthetic construct; identical to SEQ ID NO: 8364
  misc_feature 1..37: note = Probe
  source 1..37: mol_type = other DNA

SEQ ID NO: 51120 - DNA, 38 bp, synthetic construct; identical to SEQ ID NO: 14458
  misc_feature 1..38: note = Probe
  source 1..38: mol_type = other DNA

SEQ ID NO: 51121 - DNA, 50 bp, synthetic construct; identical to SEQ ID NO: 1795
  misc_feature 1..50: note = Probe
  source 1..50: mol_type = other DNA

SEQ ID NO: 51122 - DNA, 50 bp, synthetic construct; identical to SEQ ID NO: 8365
  misc_feature 1..50: note = Probe
  source 1..50: mol_type = other DNA

SEQ ID NO: 51123 - DNA, 21 bp, synthetic construct
  misc_feature 1..21: note = Probe
  source 1..21: mol_type = other DNA
ttaggagatttcaacttaact

SEQ ID NO: 51124 - DNA, 25 bp, synthetic construct
  misc_feature 1..25: note = Probe
  source 1..25: mol_type = other DNA
ttaggagatttcaacttaacttgac

SEQ ID NO: 51125 - DNA, 26 bp, synthetic construct
  misc_feature 1..26: note = Probe
  source 1..26: mol_type = other DNA
ttaggagatttcaacttaacttgacc

SEQ ID NO: 51126 - DNA, 27 bp, synthetic construct
  misc_feature 1..27: note = Probe
  source 1..27: mol_type = other DNA
ttaggagatttcaacttaacttgaccg

SEQ ID NO: 51127 - DNA, 29 bp, synthetic construct
  misc_feature 1..29: note = Probe
  source 1..29: mol_type = other DNA
ttaggagatttcaacttaacttgaccgct

SEQ ID NO: 51128 - DNA, 31 bp, synthetic construct; identical to SEQ ID NO: 8368
  misc_feature 1..31: note = Probe
  source 1..31: mol_type = other DNA

SEQ ID NO: 51129 - DNA, 35 bp, synthetic construct; identical to SEQ ID NO: 8372
  misc_feature 1..35: note = Probe
  source 1..35: mol_type = other DNA

SEQ ID NO: 51130 - DNA, 36 bp, synthetic construct; identical to SEQ ID NO: 8373
  misc_feature 1..36: note = Probe
  source 1..36: mol_type = other DNA

SEQ ID NO: 51131 - DNA, 19 bp, synthetic construct
  misc_feature 1..19: note = Probe
  source 1..19: mol_type = other DNA
ttagggtgcgagaggtccc

SEQ ID NO: 51132 - DNA, 50 bp, synthetic construct; identical to SEQ ID NO: 8377
  misc_feature 1..50: note = Probe
  source 1..50: mol_type = other DNA

SEQ ID NO: 51133 - DNA, 21 bp, synthetic construct
  misc_feature 1..21: note = Probe
  source 1..21: mol_type = other DNA
ttcaaatcccggacgagcccc

SEQ ID NO: 51134 - DNA, 23 bp, synthetic construct
  misc_feature 1..23: note = Probe
  source 1..23: mol_type = other DNA
ttcaaatcccggacgagccccct

SEQ ID NO: 51135 - DNA, 21 bp, synthetic construct
  misc_feature 1..21: note = Probe
  source 1..21: mol_type = other DNA
ttcaaatccgggtgccccctc

SEQ ID NO: 51136 - DNA, 23 bp, synthetic construct
  misc_feature 1..23: note = Probe
  source 1..23: mol_type = other DNA
ttcaaatccgggtgccccctcaa

SEQ ID NO: 51137 - DNA, 26 bp, synthetic construct
  misc_feature 1..26: note = Probe
  source 1..26: mol_type = other DNA
ttcaacttaacttgaccgctctgagc

SEQ ID NO: 51138 - DNA, 27 bp, synthetic construct
  misc_feature 1..27: note = Probe
  source 1..27: mol_type = other DNA
ttcaacttaacttgaccgctctgagct

SEQ ID NO: 51139 - DNA, 23 bp, synthetic construct
  misc_feature 1..23: note = Probe
  source 1..23: mol_type = other DNA
ttcaagtccctgttcgggcggca

SEQ ID NO: 51140 - DNA, 23 bp, synthetic construct
  misc_feature 1..23: note = Probe
  source 1..23: mol_type = other DNA
ttcaattcccggtcagggaacca

SEQ ID NO: 51141 - DNA, 42 bp, synthetic construct
  misc_feature 1..42: note = Probe
  source 1..42: mol_type = other DNA
ttcacccaggtggcccgggttcgactcccggtatgggaacaa

SEQ ID NO: 51142 - DNA, 23 bp, synthetic construct
  misc_feature 1..23: note = Probe
  source 1..23: mol_type = other DNA
ttcagttgatgcagagtggggtt

SEQ ID NO: 51143 - DNA, 26 bp, synthetic construct
  misc_feature 1..26: note = Probe
  source 1..26: mol_type = other DNA
ttcagttgatgcagagtggggttttg

SEQ ID NO: 51144 - DNA, 31 bp, synthetic construct; identical to SEQ ID NO: 8393
  misc_feature 1..31: note = Probe
  source 1..31: mol_type = other DNA

SEQ ID NO: 51145 - DNA, 32 bp, synthetic construct; identical to SEQ ID NO: 35594
  misc_feature 1..32: note = Probe
  source 1..32: mol_type = other DNA

SEQ ID NO: 51146 - DNA, 33 bp, synthetic construct; identical to SEQ ID NO: 8394
  misc_feature 1..33: note = Probe
  source 1..33: mol_type = other DNA

SEQ ID NO: 51147 - DNA, 36 bp, synthetic construct; identical to SEQ ID NO: 8396
  misc_feature 1..36: note = Probe
  source 1..36: mol_type = other DNA

SEQ ID NO: 51148 - DNA, 37 bp, synthetic construct; identical to SEQ ID NO: 8397
  misc_feature 1..37: note = Probe
  source 1..37: mol_type = other DNA

SEQ ID NO: 51149 - DNA, 38 bp, synthetic construct; identical to SEQ ID NO: 8398
  misc_feature 1..38: note = Probe
  source 1..38: mol_type = other DNA

SEQ ID NO: 51150 - DNA, 39 bp, synthetic construct; identical to SEQ ID NO: 8399
  misc_feature 1..39: note = Probe
  source 1..39: mol_type = other DNA

SEQ ID NO: 51151 - DNA, 40 bp, synthetic construct; identical to SEQ ID NO: 8400
  misc_feature 1..40: note = Probe
  source 1..40: mol_type = other DNA

SEQ ID NO: 51152 - DNA, 41 bp, synthetic construct; identical to SEQ ID NO: 24655
  misc_feature 1..41: note = Probe
  source 1..41: mol_type = other DNA

SEQ ID NO: 51153 - DNA, 33 bp, synthetic construct; identical to SEQ ID NO: 35603
  misc_feature 1..33: note = Probe
  source 1..33: mol_type = other DNA

SEQ ID NO: 51154 - DNA, 42 bp, synthetic construct; identical to SEQ ID NO: 8402
  misc_feature 1..42: note = Probe
  source 1..42: mol_type = other DNA

SEQ ID NO: 51155 - DNA, 16 bp, synthetic construct
  misc_feature 1..16: note = Probe
  source 1..16: mol_type = other DNA
ttcatattgaattgca

SEQ ID NO: 51156 - DNA, 49 bp, synthetic construct; identical to SEQ ID NO: 8404
  misc_feature 1..49: note = Probe
  source 1..49: mol_type = other DNA

SEQ ID NO: 51157 - DNA, 50 bp, synthetic construct; identical to SEQ ID NO: 8405
  misc_feature 1..50: note = Probe
  source 1..50: mol_type = other DNA

SEQ ID NO: 51158 - DNA, 41 bp, synthetic construct; identical to SEQ ID NO: 8406
  misc_feature 1..41: note = Probe
  source 1..41: mol_type = other DNA

SEQ ID NO: 51159 - DNA, 42 bp, synthetic construct; identical to SEQ ID NO: 8407
  misc_feature 1..42: note = Probe
  source 1..42: mol_type = other DNA

SEQ ID NO: 51160 - DNA, 44 bp, synthetic construct; identical to SEQ ID NO: 8412
  misc_feature 1..44: note = Probe
  source 1..44: mol_type = other DNA

SEQ ID NO: 51161 - DNA, 22 bp, synthetic construct
  misc_feature 1..22: note = Probe
  source 1..22: mol_type = other DNA
ttccccgcacaggttcgaatcc

SEQ ID NO: 51162 - DNA, 23 bp, synthetic construct
  misc_feature 1..23: note = Probe
  source 1..23: mol_type = other DNA
ttccccgcacaggttcgaatcct

SEQ ID NO: 51163 - DNA, 31 bp, synthetic construct
  misc_feature 1..31: note = Probe
  source 1..31: mol_type = other DNA
ttccccgcacaggttcgaatcctgttcgtga

SEQ ID NO: 51164 - DNA, 17 bp, synthetic construct
  misc_feature 1..17: note = Probe
  source 1..17: mol_type = other DNA
ttcccgggcggcgcact

SEQ ID NO: 51165 - DNA, 18 bp, synthetic construct
  misc_feature 1..18: note = Probe
  source 1..18: mol_type = other DNA
ttcccggtcagggaacca

SEQ ID NO: 51166 - DNA, 23 bp, synthetic construct
  misc_feature 1..23: note = Probe
  source 1..23: mol_type = other DNA
ttccctggtggtctagtggttag

SEQ ID NO: 51167 - DNA, 24 bp, synthetic construct
  misc_feature 1..24: note = Probe
  source 1..24: mol_type = other DNA
ttccctggtggtctagtggttagg

SEQ ID NO: 51168 - DNA, 32 bp, synthetic construct; identical to SEQ ID NO: 42231
  misc_feature 1..32: note = Probe
  source 1..32: mol_type = other DNA

SEQ ID NO: 51169 - DNA, 34 bp, synthetic construct; identical to SEQ ID NO: 24676
  misc_feature 1..34: note = Probe
  source 1..34: mol_type = other DNA

SEQ ID NO: 51170 - DNA, 31 bp, synthetic construct; identical to SEQ ID NO: 14469
  misc_feature 1..31: note = Probe
  source 1..31: mol_type = other DNA

SEQ ID NO: 51171 - DNA, 26 bp, synthetic construct
  misc_feature 1..26: note = Probe
  source 1..26: mol_type = other DNA
ttccgtagtgtagtggtcatcacgtt

SEQ ID NO: 51172 - DNA, 31 bp, synthetic construct; identical to SEQ ID NO: 8421
  misc_feature 1..31: note = Probe
  source 1..31: mol_type = other DNA

SEQ ID NO: 51173 - DNA, 33 bp, synthetic construct; identical to SEQ ID NO: 8422
  misc_feature 1..33: note = Probe
  source 1..33: mol_type = other DNA

SEQ ID NO: 51174 - DNA, 26 bp, synthetic construct
  misc_feature 1..26: note = Probe
  source 1..26: mol_type = other DNA
ttccgtagtgtagtggttatcacgtt

SEQ ID NO: 51175 - DNA, 29 bp, synthetic construct
  misc_feature 1..29: note = Probe
  source 1..29: mol_type = other DNA
ttccgtagtgtagtggttatcacgttcgc

SEQ ID NO: 51176 - DNA, 30 bp, synthetic construct; identical to SEQ ID NO: 8425
  misc_feature 1..30: note = Probe
  source 1..30: mol_type = other DNA

SEQ ID NO: 51177 - DNA, 31 bp, synthetic construct; identical to SEQ ID NO: 8426
  misc_feature 1..31: note = Probe
  source 1..31: mol_type = other DNA

SEQ ID NO: 51178 - DNA, 50 bp, synthetic construct; identical to SEQ ID NO: 24697
  misc_feature 1..50: note = Probe
  source 1..50: mol_type = other DNA

SEQ ID NO: 51179 - DNA, 32 bp, synthetic construct; identical to SEQ ID NO: 8427
  misc_feature 1..32: note = Probe
  source 1..32: mol_type = other DNA

SEQ ID NO: 51180 - DNA, 33 bp, synthetic construct; identical to SEQ ID NO: 8428
  misc_feature 1..33: note = Probe
  source 1..33: mol_type = other DNA

SEQ ID NO: 51181 - DNA, 50 bp, synthetic construct; identical to SEQ ID NO: 24701
  misc_feature 1..50: note = Probe
  source 1..50: mol_type = other DNA

SEQ ID NO: 51182 - DNA, 50 bp, synthetic construct; identical to SEQ ID NO: 8432
  misc_feature 1..50: note = Probe
  source 1..50: mol_type = other DNA

SEQ ID NO: 51183 - DNA, 35 bp, synthetic construct; identical to SEQ ID NO: 8437
  misc_feature 1..35: note = Probe
  source 1..35: mol_type = other DNA

SEQ ID NO: 51184 - DNA, 36 bp, synthetic construct; identical to SEQ ID NO: 8438
  misc_feature 1..36: note = Probe
  source 1..36: mol_type = other DNA

SEQ ID NO: 51185 - DNA, 22 bp, synthetic construct
  misc_feature 1..22: note = Probe
  source 1..22: mol_type = other DNA
ttcgaatcccaccgctgccaca

SEQ ID NO: 51186 - DNA, 23 bp, synthetic construct
  misc_feature 1..23: note = Probe
  source 1..23: mol_type = other DNA
ttcgaatcccaccgctgccacac

SEQ ID NO: 51187 - DNA, 20 bp, synthetic construct
  misc_feature 1..20: note = Probe
  source 1..20: mol_type = other DNA
ttcgaatcccactcctgaca

SEQ ID NO: 51188 - DNA, 21 bp, synthetic construct
  misc_feature 1..21: note = Probe
  source 1..21: mol_type = other DNA
ttcgaatcccactcctgacaa

SEQ ID NO: 51189 - DNA, 21 bp, synthetic construct
  misc_feature 1..21: note = Probe
  source 1..21: mol_type = other DNA
ttcgaatcccactcctgacag

SEQ ID NO: 51190 - DNA, 20 bp, synthetic construct
  misc_feature 1..20: note = Probe
  source 1..20: mol_type = other DNA
ttcgaatcccacttctgaca

SEQ ID NO: 51191 - DNA, 23 bp, synthetic construct
  misc_feature 1..23: note = Probe
  source 1..23: mol_type = other DNA
ttcgaatcccacttctgacacaa

SEQ ID NO: 51192 - DNA, 23 bp, synthetic construct
  misc_feature 1..23: note = Probe
  source 1..23: mol_type = other DNA
ttcgaatcccagcggtgcctccg

SEQ ID NO: 51193 - DNA, 23 bp, synthetic construct
  misc_feature 1..23: note = Probe
  source 1..23: mol_type = other DNA
ttcgaatcctgccgactacggca

SEQ ID NO: 51194 - DNA, 23 bp, synthetic construct
  misc_feature 1..23: note = Probe
  source 1..23: mol_type = other DNA
ttcgaatcctgccgactacgtca

SEQ ID NO: 51195 - DNA, 34 bp, synthetic construct; identical to SEQ ID NO: 24713
  misc_feature 1..34: note = Probe
  source 1..34: mol_type = other DNA

SEQ ID NO: 51196 - DNA, 37 bp, synthetic construct; identical to SEQ ID NO: 8443
  misc_feature 1..37: note = Probe
  source 1..37: mol_type = other DNA

SEQ ID NO: 51197 - DNA, 38 bp, synthetic construct; identical to SEQ ID NO: 24714
  misc_feature 1..38: note = Probe
  source 1..38: mol_type = other DNA

SEQ ID NO: 51198 - DNA, 39 bp, synthetic construct; identical to SEQ ID NO: 8444
  misc_feature 1..39: note = Probe
  source 1..39: mol_type = other DNA

SEQ ID NO: 51199 - DNA, 23 bp, synthetic construct
  misc_feature 1..23: note = Probe
  source 1..23: mol_type = other DNA
ttcgactcccggtatgggaacaa

SEQ ID NO: 51200 - DNA, 22 bp, synthetic construct
  misc_feature 1..22: note = Probe
  source 1..22: mol_type = other DNA
ttcgactcccggtgtgggaacg

SEQ ID NO: 51201 - DNA, 23 bp, synthetic construct
  misc_feature 1..23: note = Probe
  source 1..23: mol_type = other DNA
ttcgactcccggtgtgggaacgc

SEQ ID NO: 51202 - DNA, 18 bp, synthetic construct
  misc_feature 1..18: note = Probe
  source 1..18: mol_type = other DNA
ttcgagcccacccaggga

SEQ ID NO: 51203 - DNA, 22 bp, synthetic construct
  misc_feature 1..22: note = Probe
  source 1..22: mol_type = other DNA
ttcgagcccacccagggacgcc

SEQ ID NO: 51204 - DNA, 23 bp, synthetic construct
  misc_feature 1..23: note = Probe
  source 1..23: mol_type = other DNA
ttcgagcccacccagggacgcct

SEQ ID NO: 51205 - DNA, 20 bp, synthetic construct
  misc_feature 1..20: note = Probe
  source 1..20: mol_type = other DNA
ttcgagcctcacctggagca

SEQ ID NO: 51206 - DNA, 23 bp, synthetic construct
  misc_feature 1..23: note = Probe
  source 1..23: mol_type = other DNA
ttcgagtcccacctggggtgtcg

SEQ ID NO: 51207 - DNA, 23 bp, synthetic construct
  misc_feature 1..23: note = Probe
  source 1..23: mol_type = other DNA
ttcgagtcccatctgggtcgcgt

SEQ ID NO: 51208 - DNA, 23 bp, synthetic construct
  misc_feature 1..23: note = Probe
  source 1..23: mol_type = other DNA
ttcgagtcccttcgtggtcgttg

SEQ ID NO: 51209 - DNA, 20 bp, synthetic construct
  misc_feature 1..20: note = Probe
  source 1..20: mol_type = other DNA
ttcgatccccggcatctcca

SEQ ID NO: 51210 - DNA, 23 bp, synthetic construct
  misc_feature 1..23: note = Probe
  source 1..23: mol_type = other DNA
ttcgatccccggcatctccattg

SEQ ID NO: 51211 - DNA, 23 bp, synthetic construct
  misc_feature 1..23: note = Probe
  source 1..23: mol_type = other DNA
ttcgatccccgtacgggccacga

SEQ ID NO: 51212 - DNA, 23 bp, synthetic construct
  misc_feature 1..23: note = Probe
  source 1..23: mol_type = other DNA
ttcgatccccgtacgggccactg

SEQ ID NO: 51213 - DNA, 20 bp, synthetic construct
  misc_feature 1..20: note = Probe
  source 1..20: mol_type = other DNA
ttcgatcccgggtttcggca

SEQ ID NO: 51214 - DNA, 23 bp, synthetic construct
  misc_feature 1..23: note = Probe
  source 1..23: mol_type = other DNA
ttcgatcctcacacggggcacaa

SEQ ID NO: 51215 - DNA, 21 bp, synthetic construct
  misc_feature 1..21: note = Probe
  source 1..21: mol_type = other DNA
ttcgattccccgacggggaga

SEQ ID NO: 51216 - DNA, 22 bp, synthetic construct
  misc_feature 1..22: note = Probe
  source 1..22: mol_type = other DNA
ttcgattccccgacggggagac

SEQ ID NO: 51217 - DNA, 21 bp, synthetic construct
  misc_feature 1..21: note = Probe
  source 1..21: mol_type = other DNA
ttcgattccccgacggggagg

SEQ ID NO: 51218 - DNA, 22 bp, synthetic construct
  misc_feature 1..22: note = Probe
  source 1..22: mol_type = other DNA
ttcgattccccgacggggaggc

SEQ ID NO: 51219 - DNA, 23 bp, synthetic construct
  misc_feature 1..23: note = Probe
  source 1..23: mol_type = other DNA
ttcgattccccgacggggaggca

SEQ ID NO: 51220 - DNA, 20 bp, synthetic construct
  misc_feature 1..20: note = Probe
  source 1..20: mol_type = other DNA
ttcgattcccggccaacgca

SEQ ID NO: 51221 - DNA, 23 bp, synthetic construct
  misc_feature 1..23: note = Probe
  source 1..23: mol_type = other DNA
ttcgattcccggccaacgcaagt

SEQ ID NO: 51222 - DNA, 23 bp, synthetic construct
  misc_feature 1..23: note = Probe
  source 1..23: mol_type = other DNA
ttcgattcccggccaacgcagtg

SEQ ID NO: 51223 - DNA, 23 bp, synthetic construct
  misc_feature 1..23: note = Probe
  source 1..23: mol_type = other DNA
ttcgattcccggccaatgcacga

SEQ ID NO: 51224 - DNA, 23 bp, synthetic construct
  misc_feature 1..23: note = Probe
  source 1..23: mol_type = other DNA
ttcgattcccggccaatgcagca

SEQ ID NO: 51225 - DNA, 23 bp, synthetic construct
  misc_feature 1..23: note = Probe
  source 1..23: mol_type = other DNA
ttcgattcccgggcggcgcactt

SEQ ID NO: 51226 - DNA, 23 bp, synthetic construct
  misc_feature 1..23: note = Probe
  source 1..23: mol_type = other DNA
ttcgattcccggtcagggaacaa

SEQ ID NO: 51227 - DNA, 23 bp, synthetic construct
  misc_feature 1..23: note = Probe
  source 1..23: mol_type = other DNA
ttcgattcccggtcatggaacca

SEQ ID NO: 51228 - DNA, 23 bp, synthetic construct
  misc_feature 1..23: note = Probe
  source 1..23: mol_type = other DNA
ttcgattcctggtcagggaacca

SEQ ID NO: 51229 - DNA, 19 bp, synthetic construct
  misc_feature 1..19: note = Probe
  source 1..19: mol_type = other DNA
ttcgggtgcgagaggtccc

SEQ ID NO: 51230 - DNA, 37 bp, synthetic construct; identical to SEQ ID NO: 8466
  misc_feature 1..37: note = Probe
  source 1..37: mol_type = other DNA

SEQ ID NO: 51231 - DNA, 38 bp, synthetic construct; identical to SEQ ID NO: 8468
  misc_feature 1..38: note = Probe
  source 1..38: mol_type = other DNA

SEQ ID NO: 51232 - DNA, 25 bp, synthetic construct
  misc_feature 1..25: note = Probe
  source 1..25: mol_type = other DNA
ttgacaacattcaaaaaagagtaat

SEQ ID NO: 51233 - DNA, 26 bp, synthetic construct
  misc_feature 1..26: note = Probe
  source 1..26: mol_type = other DNA
ttgacaacattcaaaaaagagtaata

SEQ ID NO: 51234 - DNA, 44 bp, synthetic construct; identical to SEQ ID NO: 8472
  misc_feature 1..44: note = Probe
  source 1..44: mol_type = other DNA

SEQ ID NO: 51235 - DNA, 45 bp, synthetic construct; identical to SEQ ID NO: 8473
  misc_feature 1..45: note = Probe
  source 1..45: mol_type = other DNA

SEQ ID NO: 51236 - DNA, 26 bp, synthetic construct
  misc_feature 1..26: note = Probe
  source 1..26: mol_type = other DNA
ttgatgcagagtggggttttgcagtc

SEQ ID NO: 51237 - DNA, 43 bp, synthetic construct; identical to SEQ ID NO: 8477
  misc_feature 1..43: note = Probe
  source 1..43: mol_type = other DNA

SEQ ID NO: 51238 - DNA, 17 bp, synthetic construct
  misc_feature 1..17: note = Probe
  source 1..17: mol_type = other DNA
ttgccatgttaacgttt

SEQ ID NO: 51239 - DNA, 18 bp, synthetic construct
  misc_feature 1..18: note = Probe
  source 1..18: mol_type = other DNA
ttgccatgttaacgtttt

SEQ ID NO: 51240 - DNA, 30 bp, synthetic construct
  misc_feature 1..30: note = Probe
  source 1..30: mol_type = other DNA
ttgcgtgttcaaatcacgtcggggtcaaca

SEQ ID NO: 51241 - DNA, 43 bp, synthetic construct
  misc_feature 1..43: note = Probe
  source 1..43: mol_type = other DNA
ttgcgttcagttgatgcagagtggggttttgcagtccttagct

SEQ ID NO: 51242 - DNA, 50 bp, synthetic construct; identical to SEQ ID NO: 8478
  misc_feature 1..50: note = Probe
  source 1..50: mol_type = other DNA

SEQ ID NO: 51243 - DNA, 41 bp, synthetic construct; identical to SEQ ID NO: 8481
  misc_feature 1..41: note = Probe
  source 1..41: mol_type = other DNA

SEQ ID NO: 51244 - DNA, 24 bp, synthetic construct
  misc_feature 1..24: note = Probe
  source 1..24: mol_type = other DNA
ttggtcgtggttgtagtccgtgcg

SEQ ID NO: 51245 - DNA, 26 bp, synthetic construct
  misc_feature 1..26: note = Probe
  source 1..26: mol_type = other DNA
ttggtcgtggttgtagtccgtgcgag

SEQ ID NO: 51246 - DNA, 27 bp, synthetic construct
  misc_feature 1..27: note = Probe
  source 1..27: mol_type = other DNA
ttggtcgtggttgtagtccgtgcgaga

SEQ ID NO: 51247 - DNA, 28 bp, synthetic construct
  misc_feature 1..28: note = Probe
  source 1..28: mol_type = other DNA
ttggtcgtggttgtagtccgtgcgagaa

SEQ ID NO: 51248 - DNA, 29 bp, synthetic construct
  misc_feature 1..29: note = Probe
  source 1..29: mol_type = other DNA
ttggtggttcagtggtagaattctcgcct

SEQ ID NO: 51249 - DNA, 32 bp, synthetic construct; identical to SEQ ID NO: 8493
  misc_feature 1..32: note = Probe
  source 1..32: mol_type = other DNA

SEQ ID NO: 51250 - DNA, 24 bp, synthetic construct
  misc_feature 1..24: note = Probe
  source 1..24: mol_type = other DNA
ttggtggttcgagcccacccaggg

SEQ ID NO: 51251 - DNA, 25 bp, synthetic construct
  misc_feature 1..25: note = Probe
  source 1..25: mol_type = other DNA
ttggtggttcgagcccacccaggga

SEQ ID NO: 51252 - DNA, 27 bp, synthetic construct
  misc_feature 1..27: note = Probe
  source 1..27: mol_type = other DNA
ttggtggttcgagcccacccagggacg

SEQ ID NO: 51253 - DNA, 28 bp, synthetic construct
  misc_feature 1..28: note = Probe
  source 1..28: mol_type = other DNA
ttggtggttcgagcccacccagggacgc

SEQ ID NO: 51254 - DNA, 29 bp, synthetic construct
  misc_feature 1..29: note = Probe
  source 1..29: mol_type = other DNA
ttggtggttcgagcccacccagggacgcc

SEQ ID NO: 51255 - DNA, 36 bp, synthetic construct; identical to SEQ ID NO: 1800
  misc_feature 1..36: note = Probe
  source 1..36: mol_type = other DNA

SEQ ID NO: 51256 - DNA, 37 bp, synthetic construct; identical to SEQ ID NO: 8497
  misc_feature 1..37: note = Probe
  source 1..37: mol_type = other DNA

SEQ ID NO: 51257 - DNA, 38 bp, synthetic construct; identical to SEQ ID NO: 8498
  misc_feature 1..38: note = Probe
  source 1..38: mol_type = other DNA

SEQ ID NO: 51258 - DNA, 39 bp, synthetic construct; identical to SEQ ID NO: 8499
  misc_feature 1..39: note = Probe
  source 1..39: mol_type = other DNA

SEQ ID NO: 51259 - DNA, 44 bp, synthetic construct; identical to SEQ ID NO: 8511
  misc_feature 1..44: note = Probe
  source 1..44: mol_type = other DNA

SEQ ID NO: 51260 - DNA, 35 bp, synthetic construct; identical to SEQ ID NO: 8515
  misc_feature 1..35: note = Probe
  source 1..35: mol_type = other DNA

SEQ ID NO: 51261 - DNA, 45 bp, synthetic construct; identical to SEQ ID NO: 8516
  misc_feature 1..45: note = Probe
  source 1..45: mol_type = other DNA

SEQ ID NO: 51262 - DNA, 50 bp, synthetic construct; identical to SEQ ID NO: 8517
  misc_feature 1..50: note = Probe
  source 1..50: mol_type = other DNA

SEQ ID NO: 51263 - DNA, 45 bp, synthetic construct; identical to SEQ ID NO: 24797
  misc_feature 1..45: note = Probe
  source 1..45: mol_type = other DNA

SEQ ID NO: 51264 - DNA, 30 bp, synthetic construct; identical to SEQ ID NO: 24800
  misc_feature 1..30: note = Probe
  source 1..30: mol_type = other DNA

SEQ ID NO: 51265 - DNA, 33 bp, synthetic construct; identical to SEQ ID NO: 8521
  misc_feature 1..33: note = Probe
  source 1..33: mol_type = other DNA

SEQ ID NO: 51266 - DNA, 30 bp, synthetic construct; identical to SEQ ID NO: 24807
  misc_feature 1..30: note = Probe
  source 1..30: mol_type = other DNA

SEQ ID NO: 51267 - DNA, 32 bp, synthetic construct; identical to SEQ ID NO: 8526
  misc_feature 1..32: note = Probe
  source 1..32: mol_type = other DNA

SEQ ID NO: 51268 - DNA, 33 bp, synthetic construct; identical to SEQ ID NO: 8527
  misc_feature 1..33: note = Probe
  source 1..33: mol_type = other DNA

SEQ ID NO: 51269 - DNA, 27 bp, synthetic construct
  misc_feature 1..27: note = Probe
  source 1..27: mol_type = other DNA
tttcaacttaacttgaccgctctgagc

SEQ ID NO: 51270 - DNA, 28 bp, synthetic construct
  misc_feature 1..28: note = Probe
  source 1..28: mol_type = other DNA
tttcaacttaacttgaccgctctgagct

SEQ ID NO: 51271 - DNA, 30 bp, synthetic construct
  misc_feature 1..30: note = Probe
  source 1..30: mol_type = other DNA
tttccgtagtgtagcggttatcacattcgc

SEQ ID NO: 51272 - DNA, 27 bp, synthetic construct
  misc_feature 1..27: note = Probe
  source 1..27: mol_type = other DNA
tttccgtagtgtagtggttatcacgtt

SEQ ID NO: 51273 - DNA, 30 bp, synthetic construct; identical to SEQ ID NO: 24813
  misc_feature 1..30: note = Probe
  source 1..30: mol_type = other DNA

SEQ ID NO: 51274 - DNA, 31 bp, synthetic construct; identical to SEQ ID NO: 24814
  misc_feature 1..31: note = Probe
  source 1..31: mol_type = other DNA

SEQ ID NO: 51275 - DNA, 32 bp, synthetic construct; identical to SEQ ID NO: 24815
  misc_feature 1..32: note = Probe
  source 1..32: mol_type = other DNA

SEQ ID NO: 51276 - DNA, 40 bp, synthetic construct
  misc_feature 1..40: note = Probe
  source 1..40: mol_type = other DNA
tttcgactcattaaattatgataatcatatttaccaaatg

SEQ ID NO: 51277 - DNA, 45 bp, synthetic construct; identical to SEQ ID NO: 8531
  misc_feature 1..45: note = Probe
  source 1..45: mol_type = other DNA

SEQ ID NO: 51278 - DNA, 46 bp, synthetic construct; identical to SEQ ID NO: 8532
  misc_feature 1..46: note = Probe
  source 1..46: mol_type = other DNA

SEQ ID NO: 51279 - DNA, 19 bp, synthetic construct
  misc_feature 1..19: note = Probe
  source 1..19: mol_type = other DNA
tttgggtgcgagaggtccc

SEQ ID NO: 51280 - DNA, 42 bp, synthetic construct; identical to SEQ ID NO: 24831
  misc_feature 1..42: note = Probe
  source 1..42: mol_type = other DNA

SEQ ID NO: 51281 - DNA, 36 bp, synthetic construct; identical to SEQ ID NO: 36038
  misc_feature 1..36: note = Probe
  source 1..36: mol_type = other DNA

SEQ ID NO: 51282 - DNA, 44 bp, synthetic construct
  misc_feature 1..44: note = Probe
  source 1..44: mol_type = other DNA
tttgtcaaagttaaattataggctaaatcctatatatcttaatg

SEQ ID NO: 51283 - DNA, 25 bp, synthetic construct
  misc_feature 1..25: note = Probe
  source 1..25: mol_type = other DNA
tttgtgggtttaagtcccattggtc

SEQ ID NO: 51284 - DNA, 26 bp, synthetic construct
  misc_feature 1..26: note = Probe
  source 1..26: mol_type = other DNA
tttgtgggtttaagtcccattggtct

SEQ ID NO: 51285 - DNA, 50 bp, synthetic construct
  misc_feature 1..50: note = Probe
  source 1..50: mol_type = other DNA
ttttaagttaaagattaagagaaccaacacctctttacagtgaaatgccc

SEQ ID NO: 51286 - DNA, 50 bp, synthetic construct; identical to SEQ ID NO: 39
  misc_feature 1..50: note = Probe
  source 1..50: mol_type = other DNA

SEQ ID NO: 51287 - DNA, 50 bp, synthetic construct; identical to SEQ ID NO: 47
  misc_feature 1..50: note = Probe
  source 1..50: mol_type = other DNA

SEQ ID NO: 51288 - DNA, 38 bp, synthetic construct; identical to SEQ ID NO: 61
  misc_feature 1..38: note = Probe
  source 1..38: mol_type = other DNA

SEQ ID NO: 51289 - DNA, 50 bp, synthetic construct; identical to SEQ ID NO: 117
  misc_feature 1..50: note = Probe
  source 1..50: mol_type = other DNA

SEQ ID NO: 51290 - DNA, 50 bp, synthetic construct; identical to SEQ ID NO: 124
  misc_feature 1..50: note = Probe
  source 1..50: mol_type = other DNA

SEQ ID NO: 51291 - DNA, 20 bp, synthetic construct
  misc_feature 1..20: note = Probe
  source 1..20: mol_type = other DNA
acacgcgaaaggtccccggt

SEQ ID NO: 51292 - DNA, 35 bp, synthetic construct; identical to SEQ ID NO: 12530
  misc_feature 1..35: note = Probe
  source 1..35: mol_type = other DNA

SEQ ID NO: 51293 - DNA, 41 bp, synthetic construct; identical to SEQ ID NO: 44433
  misc_feature 1..41: note = Probe
  source 1..41: mol_type = other DNA

SEQ ID NO: 51294 - DNA, 50 bp, synthetic construct; identical to SEQ ID NO: 138
  misc_feature 1..50: note = Probe
  source 1..50: mol_type = other DNA

SEQ ID NO: 51295 - DNA, 17 bp, synthetic construct
  misc_feature 1..17: note = Probe
  source 1..17: mol_type = other DNA
acgccaaggtcgcgggt

SEQ ID NO: 51296 - DNA, 18 bp, synthetic construct
  misc_feature 1..18: note = Probe
  source 1..18: mol_type = other DNA
acgcgaaaggtccccggt

SEQ ID NO: 51297 - DNA, 17 bp, synthetic construct
  misc_feature 1..17: note = Probe
  source 1..17: mol_type = other DNA
acgcgggagaccggggt

SEQ ID NO: 51298 - DNA, 18 bp, synthetic construct
  misc_feature 1..18: note = Probe
  source 1..18: mol_type = other DNA
acgcgggagaccggggtt

SEQ ID NO: 51299 - DNA, 17 bp, synthetic construct
  misc_feature 1..17: note = Probe
  source 1..17: mol_type = other DNA
acgcgggaggcccgggt

SEQ ID NO: 51300 - DNA, 18 bp, synthetic construct
  misc_feature 1..18: note = Probe
  source 1..18: mol_type = other DNA
acgcgggaggcccgggtt

SEQ ID NO: 51301 - DNA, 19 bp, synthetic construct
  misc_feature 1..19: note = Probe
  source 1..19: mol_type = other DNA
acgcgggaggcccgggttt

SEQ ID NO: 51302 - DNA, 34 bp, synthetic construct; identical to SEQ ID NO: 197
  misc_feature 1..34: note = Probe
  source 1..34: mol_type = other DNA

SEQ ID NO: 51303 - DNA, 23 bp, synthetic construct
  misc_feature 1..23: note = Probe
  source 1..23: mol_type = other DNA
actttgaatccagcgatccgagt

SEQ ID NO: 51304 - DNA, 24 bp, synthetic construct
  misc_feature 1..24: note = Probe
  source 1..24: mol_type = other DNA
actttgaatccagcgatccgagtt

SEQ ID NO: 51305 - DNA, 39 bp, synthetic construct; identical to SEQ ID NO: 205
  misc_feature 1..39: note = Probe
  source 1..39: mol_type = other DNA

SEQ ID NO: 51306 - DNA, 31 bp, synthetic construct; identical to SEQ ID NO: 210
  misc_feature 1..31: note = Probe
  source 1..31: mol_type = other DNA

SEQ ID NO: 51307 - DNA, 32 bp, synthetic construct; identical to SEQ ID NO: 211
  misc_feature 1..32: note = Probe
  source 1..32: mol_type = other DNA

SEQ ID NO: 51308 - DNA, 22 bp, synthetic construct
  misc_feature 1..22: note = Probe
  source 1..22: mol_type = other DNA
agaccggggttcgattccccga

SEQ ID NO: 51309 - DNA, 19 bp, synthetic construct
  misc_feature 1..19: note = Probe
  source 1..19: mol_type = other DNA
agagcccggtaatcgcata

SEQ ID NO: 51310 - DNA, 26 bp, synthetic construct
  misc_feature 1..26: note = Probe
  source 1..26: mol_type = other DNA
agagcccggtaatcgcataaaactta

SEQ ID NO: 51311 - DNA, 50 bp, synthetic construct; identical to SEQ ID NO: 3146
  misc_feature 1..50: note = Probe
  source 1..50: mol_type = other DNA

SEQ ID NO: 51312 - DNA, 29 bp, synthetic construct
  misc_feature 1..29: note = Probe
  source 1..29: mol_type = other DNA
agcactctggactctgaatccagcgatcc

SEQ ID NO: 51313 - DNA, 30 bp, synthetic construct; identical to SEQ ID NO: 270
  misc_feature 1..30: note = Probe
  source 1..30: mol_type = other DNA

SEQ ID NO: 51314 - DNA, 29 bp, synthetic construct
  misc_feature 1..29: note = Probe
  source 1..29: mol_type = other DNA
agcactctggactttgaatccagcgatcc

SEQ ID NO: 51315 - DNA, 29 bp, synthetic construct
  misc_feature 1..29: note = Probe
  source 1..29: mol_type = other DNA
agcatagctgccttccaagcagttgaccc

SEQ ID NO: 51316 - DNA, 30 bp, synthetic construct; identical to SEQ ID NO: 3263
  misc_feature 1..30: note = Probe
  source 1..30: mol_type = other DNA

SEQ ID NO: 51317 - DNA, 35 bp, synthetic construct; identical to SEQ ID NO: 280
  misc_feature 1..35: note = Probe
  source 1..35: mol_type = other DNA

SEQ ID NO: 51318 - DNA, 36 bp, synthetic construct; identical to SEQ ID NO: 281
  misc_feature 1..36: note = Probe
  source 1..36: mol_type = other DNA

SEQ ID NO: 51319 - DNA, 50 bp, synthetic construct; identical to SEQ ID NO: 285
  misc_feature 1..50: note = Probe
  source 1..50: mol_type = other DNA

SEQ ID NO: 51320 - DNA, 50 bp, synthetic construct; identical to SEQ ID NO: 3312
  misc_feature 1..50: note = Probe
  source 1..50: mol_type = other DNA

SEQ ID NO: 51321 - DNA, 36 bp, synthetic construct; identical to SEQ ID NO: 12701
  misc_feature 1..36: note = Probe
  source 1..36: mol_type = other DNA

SEQ ID NO: 51322 - DNA, 36 bp, synthetic construct; identical to SEQ ID NO: 16503
  misc_feature 1..36: note = Probe
  source 1..36: mol_type = other DNA

SEQ ID NO: 51323 - DNA, 31 bp, synthetic construct; identical to SEQ ID NO: 315
  misc_feature 1..31: note = Probe
  source 1..31: mol_type = other DNA

SEQ ID NO: 51324 - DNA, 29 bp, synthetic construct
  misc_feature 1..29: note = Probe
  source 1..29: mol_type = other DNA
aggattcctggttttcacccaggcggccc

SEQ ID NO: 51325 - DNA, 28 bp, synthetic construct
  misc_feature 1..28: note = Probe
  source 1..28: mol_type = other DNA
aggattcggcgctctcaccgccgcggcc

SEQ ID NO: 51326 - DNA, 29 bp, synthetic construct
  misc_feature 1..29: note = Probe
  source 1..29: mol_type = other DNA
aggattcggcgctctcaccgccgcggccc

SEQ ID NO: 51327 - DNA, 30 bp, synthetic construct; identical to SEQ ID NO: 16665
  misc_feature 1..30: note = Probe
  source 1..30: mol_type = other DNA

SEQ ID NO: 51328 - DNA, 17 bp, synthetic construct
  misc_feature 1..17: note = Probe
  source 1..17: mol_type = other DNA
aggggtatgattctcgg

SEQ ID NO: 51329 - DNA, 18 bp, synthetic construct
  misc_feature 1..18: note = Probe
  source 1..18: mol_type = other DNA
aggggtatgattctcggt

SEQ ID NO: 51330 - DNA, 16 bp, synthetic construct
  misc_feature 1..16: note = Probe
  source 1..16: mol_type = other DNA
agtcggtagagcatca

SEQ ID NO: 51331 - DNA, 17 bp, synthetic construct
  misc_feature 1..17: note = Probe
  source 1..17: mol_type = other DNA
agtcggtagagcatcag

SEQ ID NO: 51332 - DNA, 18 bp, synthetic construct
  misc_feature 1..18: note = Probe
  source 1..18: mol_type = other DNA
agtcggtagagcatcaga

SEQ ID NO: 51333 - DNA, 19 bp, synthetic construct
  misc_feature 1..19: note = Probe
  source 1..19: mol_type = other DNA
agtcggtagagcatcagac

SEQ ID NO: 51334 - DNA, 18 bp, synthetic construct
  misc_feature 1..18: note = Probe
  source 1..18: mol_type = other DNA
agtcggtagagcatggga

SEQ ID NO: 51335 - DNA, 19 bp, synthetic construct
  misc_feature 1..19: note = Probe
  source 1..19: mol_type = other DNA
agtcggtagagcatgggac

SEQ ID NO: 51336 - DNA, 22 bp, synthetic construct
  misc_feature 1..22: note = Probe
  source 1..22: mol_type = other DNA
agtctcataatctgaaggtcgt

SEQ ID NO: 51337 - DNA, 23 bp, synthetic construct
  misc_feature 1..23: note = Probe
  source 1..23: mol_type = other DNA
agtctcataatctgaaggtcgtg

SEQ ID NO: 51338 - DNA, 24 bp, synthetic construct
  misc_feature 1..24: note = Probe
  source 1..24: mol_type = other DNA
agtctcataatctgaaggtcgtga

SEQ ID NO: 51339 - DNA, 25 bp, synthetic construct
  misc_feature 1..25: note = Probe
  source 1..25: mol_type = other DNA
agtctcataatctgaaggtcgtgag

SEQ ID NO: 51340 - DNA, 26 bp, synthetic construct
  misc_feature 1..26: note = Probe
  source 1..26: mol_type = other DNA
agtctcataatctgaaggtcgtgagt

SEQ ID NO: 51341 - DNA, 27 bp, synthetic construct
  misc_feature 1..27: note = Probe
  source 1..27: mol_type = other DNA
agtctcataatctgaaggtcgtgagtt

SEQ ID NO: 51342 - DNA, 18 bp, synthetic construct
  misc_feature 1..18: note = Probe
  source 1..18: mol_type = other DNA
agtggttaggattcggcg

SEQ ID NO: 51343 - DNA, 19 bp, synthetic construct
  misc_feature 1..19: note = Probe
  source 1..19: mol_type = other DNA
agtggttaggattcggcgc

SEQ ID NO: 51344 - DNA, 20 bp, synthetic construct
  misc_feature 1..20: note = Probe
  source 1..20: mol_type = other DNA
agtggttaggattcggcgct

SEQ ID NO: 51345 - DNA, 24 bp, synthetic construct
  misc_feature 1..24: note = Probe
  source 1..24: mol_type = other DNA
agtggttaggattcggcgctctca

SEQ ID NO: 51346 - DNA, 25 bp, synthetic construct
  misc_feature 1..25: note = Probe
  source 1..25: mol_type = other DNA
agtggttaggattcggcgctctcac

SEQ ID NO: 51347 - DNA, 29 bp, synthetic construct
  misc_feature 1..29: note = Probe
  source 1..29: mol_type = other DNA
agtggttaggattcggcgctctcaccgcc

SEQ ID NO: 51348 - DNA, 31 bp, synthetic construct; identical to SEQ ID NO: 16956
  misc_feature 1..31: note = Probe
  source 1..31: mol_type = other DNA

SEQ ID NO: 51349 - DNA, 35 bp, synthetic construct; identical to SEQ ID NO: 12776
  misc_feature 1..35: note = Probe
  source 1..35: mol_type = other DNA

SEQ ID NO: 51350 - DNA, 36 bp, synthetic construct; identical to SEQ ID NO: 361
  misc_feature 1..36: note = Probe
  source 1..36: mol_type = other DNA

SEQ ID NO: 51351 - DNA, 37 bp, synthetic construct; identical to SEQ ID NO: 12778
  misc_feature 1..37: note = Probe
  source 1..37: mol_type = other DNA

SEQ ID NO: 51352 - DNA, 18 bp, synthetic construct
  misc_feature 1..18: note = Probe
  source 1..18: mol_type = other DNA
agtggttagtactctgcg

SEQ ID NO: 51353 - DNA, 18 bp, synthetic construct
  misc_feature 1..18: note = Probe
  source 1..18: mol_type = other DNA
agtggttagtatccccgc

SEQ ID NO: 51354 - DNA, 20 bp, synthetic construct
  misc_feature 1..20: note = Probe
  source 1..20: mol_type = other DNA
ataacgccaaggtcgcgggt

SEQ ID NO: 51355 - DNA, 16 bp, synthetic construct
  misc_feature 1..16: note = Probe
  source 1..16: mol_type = other DNA
atcccaccgctgccac

SEQ ID NO: 51356 - DNA, 19 bp, synthetic construct
  misc_feature 1..19: note = Probe
  source 1..19: mol_type = other DNA
atccccggcacctccacca

SEQ ID NO: 51357 - DNA, 16 bp, synthetic construct
  misc_feature 1..16: note = Probe
  source 1..16: mol_type = other DNA
attcccattcttgcga

SEQ ID NO: 51358 - DNA, 50 bp, synthetic construct; identical to SEQ ID NO: 437
  misc_feature 1..50: note = Probe
  source 1..50: mol_type = other DNA

SEQ ID NO: 51359 - DNA, 50 bp, synthetic construct; identical to SEQ ID NO: 447
  misc_feature 1..50: note = Probe
  source 1..50: mol_type = other DNA

SEQ ID NO: 51360 - DNA, 21 bp, synthetic construct
  misc_feature 1..21: note = Probe
  source 1..21: mol_type = other DNA
caatccccggcacctccacca

SEQ ID NO: 51361 - DNA, 27 bp, synthetic construct
  misc_feature 1..27: note = Probe
  source 1..27: mol_type = other DNA
cactctggactctgaatccagcgatcc

SEQ ID NO: 51362 - DNA, 28 bp, synthetic construct
  misc_feature 1..28: note = Probe
  source 1..28: mol_type = other DNA
cactgtaaagctaacttagcattaacct

SEQ ID NO: 51363 - DNA, 30 bp, synthetic construct; identical to SEQ ID NO: 493
  misc_feature 1..30: note = Probe
  source 1..30: mol_type = other DNA

SEQ ID NO: 51364 - DNA, 32 bp, synthetic construct; identical to SEQ ID NO: 495
  misc_feature 1..32: note = Probe
  source 1..32: mol_type = other DNA

SEQ ID NO: 51365 - DNA, 41 bp, synthetic construct; identical to SEQ ID NO: 500
  misc_feature 1..41: note = Probe
  source 1..41: mol_type = other DNA

SEQ ID NO: 51366 - DNA, 44 bp, synthetic construct; identical to SEQ ID NO: 4184
  misc_feature 1..44: note = Probe
  source 1..44: mol_type = other DNA

SEQ ID NO: 51367 - DNA, 24 bp, synthetic construct
  misc_feature 1..24: note = Probe
  source 1..24: mol_type = other DNA
cagagaatagtttaaattagaatc

SEQ ID NO: 51368 - DNA, 30 bp, synthetic construct; identical to SEQ ID NO: 519
  misc_feature 1..30: note = Probe
  source 1..30: mol_type = other DNA

SEQ ID NO: 51369 - DNA, 32 bp, synthetic construct; identical to SEQ ID NO: 521
  misc_feature 1..32: note = Probe
  source 1..32: mol_type = other DNA

SEQ ID NO: 51370 - DNA, 16 bp, synthetic construct
  misc_feature 1..16: note = Probe
  source 1..16: mol_type = other DNA
cagtcggtagagcatc

SEQ ID NO: 51371 - DNA, 27 bp, synthetic construct
  misc_feature 1..27: note = Probe
  source 1..27: mol_type = other DNA
cagtctcataatctgaaggtcgtgagt

SEQ ID NO: 51372 - DNA, 21 bp, synthetic construct
  misc_feature 1..21: note = Probe
  source 1..21: mol_type = other DNA
cataatctgaaggtcgtgagt

SEQ ID NO: 51373 - DNA, 18 bp, synthetic construct
  misc_feature 1..18: note = Probe
  source 1..18: mol_type = other DNA
catgcaagattcccattc

SEQ ID NO: 51374 - DNA, 46 bp, synthetic construct; identical to SEQ ID NO: 558
  misc_feature 1..46: note = Probe
  source 1..46: mol_type = other DNA

SEQ ID NO: 51375 - DNA, 28 bp, synthetic construct
  misc_feature 1..28: note = Probe
  source 1..28: mol_type = other DNA
ccacatggtctagcggttaggattcctg

SEQ ID NO: 51376 - DNA, 29 bp, synthetic construct
  misc_feature 1..29: note = Probe
  source 1..29: mol_type = other DNA
ccacatggtctagcggttaggattcctgg

SEQ ID NO: 51377 - DNA, 19 bp, synthetic construct
  misc_feature 1..19: note = Probe
  source 1..19: mol_type = other DNA
ccacgcgggaggcccgggt

SEQ ID NO: 51378 - DNA, 20 bp, synthetic construct
  misc_feature 1..20: note = Probe
  source 1..20: mol_type = other DNA
ccacgcgggaggcccgggtt

SEQ ID NO: 51379 - DNA, 21 bp, synthetic construct
  misc_feature 1..21: note = Probe
  source 1..21: mol_type = other DNA
ccacgcgggaggcccgggttt

SEQ ID NO: 51380 - DNA, 16 bp, synthetic construct
  misc_feature 1..16: note = Probe
  source 1..16: mol_type = other DNA
cccattcttgcgaccc

SEQ ID NO: 51381 - DNA, 29 bp, synthetic construct
  misc_feature 1..29: note = Probe
  source 1..29: mol_type = other DNA
cccattcttgcgacccgggttcgattccc

SEQ ID NO: 51382 - DNA, 35 bp, synthetic construct; identical to SEQ ID NO: 598
  misc_feature 1..35: note = Probe
  source 1..35: mol_type = other DNA

SEQ ID NO: 51383 - DNA, 37 bp, synthetic construct; identical to SEQ ID NO: 599
  misc_feature 1..37: note = Probe
  source 1..37: mol_type = other DNA

SEQ ID NO: 51384 - DNA, 39 bp, synthetic construct; identical to SEQ ID NO: 600
  misc_feature 1..39: note = Probe
  source 1..39: mol_type = other DNA

SEQ ID NO: 51385 - DNA, 40 bp, synthetic construct; identical to SEQ ID NO: 4654
  misc_feature 1..40: note = Probe
  source 1..40: mol_type = other DNA

SEQ ID NO: 51386 - DNA, 17 bp, synthetic construct
  misc_feature 1..17: note = Probe
  source 1..17: mol_type = other DNA
ccccggcacctccacca

SEQ ID NO: 51387 - DNA, 30 bp, synthetic construct; identical to SEQ ID NO: 615
  misc_feature 1..30: note = Probe
  source 1..30: mol_type = other DNA

SEQ ID NO: 51388 - DNA, 25 bp, synthetic construct
  misc_feature 1..25: note = Probe
  source 1..25: mol_type = other DNA
cccggctagctcagtcggtagagca

SEQ ID NO: 51389 - DNA, 30 bp, synthetic construct; identical to SEQ ID NO: 4750
  misc_feature 1..30: note = Probe
  source 1..30: mol_type = other DNA

SEQ ID NO: 51390 - DNA, 32 bp, synthetic construct; identical to SEQ ID NO: 639
  misc_feature 1..32: note = Probe
  source 1..32: mol_type = other DNA

SEQ ID NO: 51391 - DNA, 27 bp, synthetic construct
  misc_feature 1..27: note = Probe
  source 1..27: mol_type = other DNA
ccgctggtgtagtggtatcatgcaaga

SEQ ID NO: 51392 - DNA, 34 bp, synthetic construct; identical to SEQ ID NO: 13026
  misc_feature 1..34: note = Probe
  source 1..34: mol_type = other DNA

SEQ ID NO: 51393 - DNA, 36 bp, synthetic construct; identical to SEQ ID NO: 13027
  misc_feature 1..36: note = Probe
  source 1..36: mol_type = other DNA

SEQ ID NO: 51394 - DNA, 28 bp, synthetic construct
  misc_feature 1..28: note = Probe
  source 1..28: mol_type = other DNA
ccggatagctcagtcggtagagcatcag

SEQ ID NO: 51395 - DNA, 29 bp, synthetic construct
  misc_feature 1..29: note = Probe
  source 1..29: mol_type = other DNA
ccggatagctcagtcggtagagcatcaga

SEQ ID NO: 51396 - DNA, 30 bp, synthetic construct; identical to SEQ ID NO: 668
  misc_feature 1..30: note = Probe
  source 1..30: mol_type = other DNA

SEQ ID NO: 51397 - DNA, 24 bp, synthetic construct
  misc_feature 1..24: note = Probe
  source 1..24: mol_type = other DNA
ccggctagctcagtcggtagagca

SEQ ID NO: 51398 - DNA, 29 bp, synthetic construct
  misc_feature 1..29: note = Probe
  source 1..29: mol_type = other DNA
ccggctagctcagtcggtagagcatgaga

SEQ ID NO: 51399 - DNA, 30 bp, synthetic construct; identical to SEQ ID NO: 675
  misc_feature 1..30: note = Probe
  source 1..30: mol_type = other DNA

SEQ ID NO: 51400 - DNA, 29 bp, synthetic construct
  misc_feature 1..29: note = Probe
  source 1..29: mol_type = other DNA
ccggctagctcagtcggtagagcatggga

SEQ ID NO: 51401 - DNA, 30 bp, synthetic construct; identical to SEQ ID NO: 680
  misc_feature 1..30: note = Probe
  source 1..30: mol_type = other DNA

SEQ ID NO: 51402 - DNA, 31 bp, synthetic construct; identical to SEQ ID NO: 681
  misc_feature 1..31: note = Probe
  source 1..31: mol_type = other DNA

SEQ ID NO: 51403 - DNA, 32 bp, synthetic construct; identical to SEQ ID NO: 682
  misc_feature 1..32: note = Probe
  source 1..32: mol_type = other DNA

SEQ ID NO: 51404 - DNA, 28 bp, synthetic construct
  misc_feature 1..28: note = Probe
  source 1..28: mol_type = other DNA
ccgtagtgtagtggtcatcacgttcgcc

SEQ ID NO: 51405 - DNA, 29 bp, synthetic construct
  misc_feature 1..29: note = Probe
  source 1..29: mol_type = other DNA
ccgtgatcgtatagtggttagtactctgc

SEQ ID NO: 51406 - DNA, 23 bp, synthetic construct
  misc_feature 1..23: note = Probe
  source 1..23: mol_type = other DNA
cctgccacgcgggaggcccgggt

SEQ ID NO: 51407 - DNA, 24 bp, synthetic construct
  misc_feature 1..24: note = Probe
  source 1..24: mol_type = other DNA
cctgccacgcgggaggcccgggtt

SEQ ID NO: 51408 - DNA, 25 bp, synthetic construct
  misc_feature 1..25: note = Probe
  source 1..25: mol_type = other DNA
cctgccacgcgggaggcccgggttt

SEQ ID NO: 51409 - DNA, 23 bp, synthetic construct
  misc_feature 1..23: note = Probe
  source 1..23: mol_type = other DNA
cctgtcacgcgggagaccggggt

SEQ ID NO: 51410 - DNA, 24 bp, synthetic construct
  misc_feature 1..24: note = Probe
  source 1..24: mol_type = other DNA
cctgtcacgcgggagaccggggtt

SEQ ID NO: 51411 - DNA, 19 bp, synthetic construct
  misc_feature 1..19: note = Probe
  source 1..19: mol_type = other DNA
ccttccaagcagttgaccc

SEQ ID NO: 51412 - DNA, 24 bp, synthetic construct
  misc_feature 1..24: note = Probe
  source 1..24: mol_type = other DNA
ccttccaagcagttgacccgggtt

SEQ ID NO: 51413 - DNA, 16 bp, synthetic construct
  misc_feature 1..16: note = Probe
  source 1..16: mol_type = other DNA
cgcgggaggcccgggt

SEQ ID NO: 51414 - DNA, 27 bp, synthetic construct
  misc_feature 1..27: note = Probe
  source 1..27: mol_type = other DNA
cggatagctcagtcggtagagcatcag

SEQ ID NO: 51415 - DNA, 28 bp, synthetic construct
  misc_feature 1..28: note = Probe
  source 1..28: mol_type = other DNA
cggatagctcagtcggtagagcatcaga

SEQ ID NO: 51416 - DNA, 28 bp, synthetic construct
  misc_feature 1..28: note = Probe
  source 1..28: mol_type = other DNA
cggctagctcagtcggtagagcatgaga

SEQ ID NO: 51417 - DNA, 29 bp, synthetic construct
  misc_feature 1..29: note = Probe
  source 1..29: mol_type = other DNA
cggctagctcagtcggtagagcatgagac

SEQ ID NO: 51418 - DNA, 27 bp, synthetic construct
  misc_feature 1..27: note = Probe
  source 1..27: mol_type = other DNA
cggctagctcagtcggtagagcatggg

SEQ ID NO: 51419 - DNA, 28 bp, synthetic construct
  misc_feature 1..28: note = Probe
  source 1..28: mol_type = other DNA
cggctagctcagtcggtagagcatggga

SEQ ID NO: 51420 - DNA, 29 bp, synthetic construct
  misc_feature 1..29: note = Probe
  source 1..29: mol_type = other DNA
cggctagctcagtcggtagagcatgggac

SEQ ID NO: 51421 - DNA, 30 bp, synthetic construct; identical to SEQ ID NO: 778
  misc_feature 1..30: note = Probe
  source 1..30: mol_type = other DNA

SEQ ID NO: 51422 - DNA, 31 bp, synthetic construct; identical to SEQ ID NO: 779
  misc_feature 1..31: note = Probe
  source 1..31: mol_type = other DNA

SEQ ID NO: 51423 - DNA, 34 bp, synthetic construct; identical to SEQ ID NO: 13220
  misc_feature 1..34: note = Probe
  source 1..34: mol_type = other DNA

SEQ ID NO: 51424 - DNA, 34 bp, synthetic construct; identical to SEQ ID NO: 13221
  misc_feature 1..34: note = Probe
  source 1..34: mol_type = other DNA

SEQ ID NO: 51425 - DNA, 20 bp, synthetic construct
  misc_feature 1..20: note = Probe
  source 1..20: mol_type = other DNA
ctaagccagggattgtgggt

SEQ ID NO: 51426 - DNA, 18 bp, synthetic construct
  misc_feature 1..18: note = Probe
  source 1..18: mol_type = other DNA
ctaatggataaggcattg

SEQ ID NO: 51427 - DNA, 37 bp, synthetic construct
  misc_feature 1..37: note = Probe
  source 1..37: mol_type = other DNA
ctagtggttaggattcggcgctctcaccgccgcggcc

SEQ ID NO: 51428 - DNA, 38 bp, synthetic construct; identical to SEQ ID NO: 13244
  misc_feature 1..38: note = Probe
  source 1..38: mol_type = other DNA

SEQ ID NO: 51429 - DNA, 39 bp, synthetic construct
  misc_feature 1..39: note = Probe
  source 1..39: mol_type = other DNA
ctagtggttaggattcggcgctctcaccgccgcggcccg

SEQ ID NO: 51430 - DNA, 50 bp, synthetic construct; identical to SEQ ID NO: 813
  misc_feature 1..50: note = Probe
  source 1..50: mol_type = other DNA

SEQ ID NO: 51431 - DNA, 23 bp, synthetic construct
  misc_feature 1..23: note = Probe
  source 1..23: mol_type = other DNA
ctcacacgcgaaaggtccccggt

SEQ ID NO: 51432 - DNA, 23 bp, synthetic construct
  misc_feature 1..23: note = Probe
  source 1..23: mol_type = other DNA
ctcataatctgaaggtcgtgagt

SEQ ID NO: 51433 - DNA, 16 bp, synthetic construct
  misc_feature 1..16: note = Probe
  source 1..16: mol_type = other DNA
ctgaatccagcgatcc

SEQ ID NO: 51434 - DNA, 17 bp, synthetic construct
  misc_feature 1..17: note = Probe
  source 1..17: mol_type = other DNA
ctgaatccagcgatccg

SEQ ID NO: 51435 - DNA, 20 bp, synthetic construct
  misc_feature 1..20: note = Probe
  source 1..20: mol_type = other DNA
ctgaatccagcgatccgagt

SEQ ID NO: 51436 - DNA, 21 bp, synthetic construct
  misc_feature 1..21: note = Probe
  source 1..21: mol_type = other DNA
ctgaatccagcgatccgagtt

SEQ ID NO: 51437 - DNA, 18 bp, synthetic construct
  misc_feature 1..18: note = Probe
  source 1..18: mol_type = other DNA
ctgccacgcgggaggccc

SEQ ID NO: 51438 - DNA, 22 bp, synthetic construct
  misc_feature 1..22: note = Probe
  source 1..22: mol_type = other DNA
ctgccacgcgggaggcccgggt

SEQ ID NO: 51439 - DNA, 23 bp, synthetic construct
  misc_feature 1..23: note = Probe
  source 1..23: mol_type = other DNA
ctgccacgcgggaggcccgggtt

SEQ ID NO: 51440 - DNA, 19 bp, synthetic construct
  misc_feature 1..19: note = Probe
  source 1..19: mol_type = other DNA
ctgtcacgcgggagaccgg

SEQ ID NO: 51441 - DNA, 20 bp, synthetic construct
  misc_feature 1..20: note = Probe
  source 1..20: mol_type = other DNA
ctgtcacgcgggagaccggg

SEQ ID NO: 51442 - DNA, 22 bp, synthetic construct
  misc_feature 1..22: note = Probe
  source 1..22: mol_type = other DNA
ctgtcacgcgggagaccggggt

SEQ ID NO: 51443 - DNA, 23 bp, synthetic construct
  misc_feature 1..23: note = Probe
  source 1..23: mol_type = other DNA
ctgtcacgcgggagaccggggtt

SEQ ID NO: 51444 - DNA, 18 bp, synthetic construct
  misc_feature 1..18: note = Probe
  source 1..18: mol_type = other DNA
cttccaagcagttgaccc

SEQ ID NO: 51445 - DNA, 23 bp, synthetic construct
  misc_feature 1..23: note = Probe
  source 1..23: mol_type = other DNA
ctttgaatccagcgatccgagtt

SEQ ID NO: 51446 - DNA, 35 bp, synthetic construct; identical to SEQ ID NO: 908
  misc_feature 1..35: note = Probe
  source 1..35: mol_type = other DNA

SEQ ID NO: 51447 - DNA, 18 bp, synthetic construct
  misc_feature 1..18: note = Probe
  source 1..18: mol_type = other DNA
gacctcgtggcgcaatgg

SEQ ID NO: 51448 - DNA, 19 bp, synthetic construct
  misc_feature 1..19: note = Probe
  source 1..19: mol_type = other DNA
gagaaagctcacaagaact

SEQ ID NO: 51449 - DNA, 20 bp, synthetic construct
  misc_feature 1..20: note = Probe
  source 1..20: mol_type = other DNA
gagaaagctcacaagaactg

SEQ ID NO: 51450 - DNA, 22 bp, synthetic construct
  misc_feature 1..22: note = Probe
  source 1..22: mol_type = other DNA
gagaaagctcacaagaactgct

SEQ ID NO: 51451 - DNA, 23 bp, synthetic construct
  misc_feature 1..23: note = Probe
  source 1..23: mol_type = other DNA
gagaaagctcacaagaactgcta

SEQ ID NO: 51452 - DNA, 25 bp, synthetic construct
  misc_feature 1..25: note = Probe
  source 1..25: mol_type = other DNA
gagaaagctcacaagaactgctaac

SEQ ID NO: 51453 - DNA, 26 bp, synthetic construct
  misc_feature 1..26: note = Probe
  source 1..26: mol_type = other DNA
gagaaagctcacaagaactgctaact

SEQ ID NO: 51454 - DNA, 30 bp, synthetic construct; identical to SEQ ID NO: 932
  misc_feature 1..30: note = Probe
  source 1..30: mol_type = other DNA

SEQ ID NO: 51455 - DNA, 32 bp, synthetic construct; identical to SEQ ID NO: 934
  misc_feature 1..32: note = Probe
  source 1..32: mol_type = other DNA

SEQ ID NO: 51456 - DNA, 36 bp, synthetic construct; identical to SEQ ID NO: 938
  misc_feature 1..36: note = Probe
  source 1..36: mol_type = other DNA

SEQ ID NO: 51457 - DNA, 38 bp, synthetic construct; identical to SEQ ID NO: 940
  misc_feature 1..38: note = Probe
  source 1..38: mol_type = other DNA

SEQ ID NO: 51458 - DNA, 40 bp, synthetic construct; identical to SEQ ID NO: 942
  misc_feature 1..40: note = Probe
  source 1..40: mol_type = other DNA

SEQ ID NO: 51459 - DNA, 41 bp, synthetic construct; identical to SEQ ID NO: 943
  misc_feature 1..41: note = Probe
  source 1..41: mol_type = other DNA

SEQ ID NO: 51460 - DNA, 42 bp, synthetic construct; identical to SEQ ID NO: 944
  misc_feature 1..42: note = Probe
  source 1..42: mol_type = other DNA

SEQ ID NO: 51461 - DNA, 45 bp, synthetic construct; identical to SEQ ID NO: 947
  misc_feature 1..45: note = Probe
  source 1..45: mol_type = other DNA

SEQ ID NO: 51462 - DNA, 50 bp, synthetic construct; identical to SEQ ID NO: 950
  misc_feature 1..50: note = Probe
  source 1..50: mol_type = other DNA

SEQ ID NO: 51463 - DNA, 18 bp, synthetic construct
  misc_feature 1..18: note = Probe
  source 1..18: mol_type = other DNA
gagcccggtaatcgcata

SEQ ID NO: 51464 - DNA, 25 bp, synthetic construct
  misc_feature 1..25: note = Probe
  source 1..25: mol_type = other DNA
gagcccggtaatcgcataaaactta

SEQ ID NO: 51465 - DNA, 30 bp, synthetic construct; identical to SEQ ID NO: 960
  misc_feature 1..30: note = Probe
  source 1..30: mol_type = other DNA

SEQ ID NO: 51466 - DNA, 31 bp, synthetic construct; identical to SEQ ID NO: 961
  misc_feature 1..31: note = Probe
  source 1..31: mol_type = other DNA

SEQ ID NO: 51467 - DNA, 35 bp, synthetic construct; identical to SEQ ID NO: 5659
  misc_feature 1..35: note = Probe
  source 1..35: mol_type = other DNA

SEQ ID NO: 51468 - DNA, 39 bp, synthetic construct; identical to SEQ ID NO: 963
  misc_feature 1..39: note = Probe
  source 1..39: mol_type = other DNA

SEQ ID NO: 51469 - DNA, 45 bp, synthetic construct; identical to SEQ ID NO: 964
  misc_feature 1..45: note = Probe
  source 1..45: mol_type = other DNA

SEQ ID NO: 51470 - DNA, 50 bp, synthetic construct; identical to SEQ ID NO: 965
  misc_feature 1..50: note = Probe
  source 1..50: mol_type = other DNA

SEQ ID NO: 51471 - DNA, 50 bp, synthetic construct; identical to SEQ ID NO: 973
  misc_feature 1..50: note = Probe
  source 1..50: mol_type = other DNA

SEQ ID NO: 51472 - DNA, 16 bp, synthetic construct
  misc_feature 1..16: note = Probe
  source 1..16: mol_type = other DNA
gattcccattcttgcg

SEQ ID NO: 51473 - DNA, 17 bp, synthetic construct
  misc_feature 1..17: note = Probe
  source 1..17: mol_type = other DNA
gattcccattcttgcga

SEQ ID NO: 51474 - DNA, 20 bp, synthetic construct
  misc_feature 1..20: note = Probe
  source 1..20: mol_type = other DNA
gattcccattcttgcgaccc

SEQ ID NO: 51475 - DNA, 27 bp, synthetic construct
  misc_feature 1..27: note = Probe
  source 1..27: mol_type = other DNA
gattcggcgctctcaccgccgcggccc

SEQ ID NO: 51476 - DNA, 28 bp, synthetic construct
  misc_feature 1..28: note = Probe
  source 1..28: mol_type = other DNA
gcactctggactctgaatccagcgatcc

SEQ ID NO: 51477 - DNA, 29 bp, synthetic construct
  misc_feature 1..29: note = Probe
  source 1..29: mol_type = other DNA
gcactctggactctgaatccagcgatccg

SEQ ID NO: 51478 - DNA, 28 bp, synthetic construct
  misc_feature 1..28: note = Probe
  source 1..28: mol_type = other DNA
gcactctggactttgaatccagcgatcc

SEQ ID NO: 51479 - DNA, 28 bp, synthetic construct
  misc_feature 1..28: note = Probe
  source 1..28: mol_type = other DNA
gcatagctgccttccaagcagttgaccc

SEQ ID NO: 51480 - DNA, 32 bp, synthetic construct; identical to SEQ ID NO: 1004
  misc_feature 1..32: note = Probe
  source 1..32: mol_type = other DNA

SEQ ID NO: 51481 - DNA, 33 bp, synthetic construct; identical to SEQ ID NO: 1005
  misc_feature 1..33: note = Probe
  source 1..33: mol_type = other DNA

SEQ ID NO: 51482 - DNA, 34 bp, synthetic construct; identical to SEQ ID NO: 1006
  misc_feature 1..34: note = Probe
  source 1..34: mol_type = other DNA

SEQ ID NO: 51483 - DNA, 38 bp, synthetic construct; identical to SEQ ID NO: 1009
  misc_feature 1..38: note = Probe
  source 1..38: mol_type = other DNA

SEQ ID NO: 51484 - DNA, 49 bp, synthetic construct; identical to SEQ ID NO: 5876
  misc_feature 1..49: note = Probe
  source 1..49: mol_type = other DNA

SEQ ID NO: 51485 - DNA, 50 bp, synthetic construct; identical to SEQ ID NO: 1010
  misc_feature 1..50: note = Probe
  source 1..50: mol_type = other DNA

SEQ ID NO: 51486 - DNA, 38 bp, synthetic construct; identical to SEQ ID NO: 1014
  misc_feature 1..38: note = Probe
  source 1..38: mol_type = other DNA

SEQ ID NO: 51487 - DNA, 39 bp, synthetic construct; identical to SEQ ID NO: 1015
  misc_feature 1..39: note = Probe
  source 1..39: mol_type = other DNA

SEQ ID NO: 51488 - DNA, 40 bp, synthetic construct; identical to SEQ ID NO: 1016
  misc_feature 1..40: note = Probe
  source 1..40: mol_type = other DNA

SEQ ID NO: 51489 - DNA, 41 bp, synthetic construct; identical to SEQ ID NO: 1017
  misc_feature 1..41: note = Probe
  source 1..41: mol_type = other DNA

SEQ ID NO: 51490 - DNA, 43 bp, synthetic construct; identical to SEQ ID NO: 5914
  misc_feature 1..43: note = Probe
  source 1..43: mol_type = other DNA

SEQ ID NO: 51491 - DNA, 49 bp, synthetic construct; identical to SEQ ID NO: 1019
  misc_feature 1..49: note = Probe
  source 1..49: mol_type = other DNA

SEQ ID NO: 51492 - DNA, 50 bp, synthetic construct; identical to SEQ ID NO: 1020
  misc_feature 1..50: note = Probe
  source 1..50: mol_type = other DNA

SEQ ID NO: 51493 - DNA, 16 bp, synthetic construct
  misc_feature 1..16: note = Probe
  source 1..16: mol_type = other DNA
gccacgcgggaggccc

SEQ ID NO: 51494 - DNA, 20 bp, synthetic construct
  misc_feature 1..20: note = Probe
  source 1..20: mol_type = other DNA
gccacgcgggaggcccgggt

SEQ ID NO: 51495 - DNA, 21 bp, synthetic construct
  misc_feature 1..21: note = Probe
  source 1..21: mol_type = other DNA
gccacgcgggaggcccgggtt

SEQ ID NO: 51496 - DNA, 22 bp, synthetic construct
  misc_feature 1..22: note = Probe
  source 1..22: mol_type = other DNA
gccacgcgggaggcccgggttt

SEQ ID NO: 51497 - DNA, 35 bp, synthetic construct; identical to SEQ ID NO: 20771
  misc_feature 1..35: note = Probe
  source 1..35: mol_type = other DNA

SEQ ID NO: 51498 - DNA, 50 bp, synthetic construct; identical to SEQ ID NO: 40288
  misc_feature 1..50: note = Probe
  source 1..50: mol_type = other DNA

SEQ ID NO: 51499 - DNA, 18 bp, synthetic construct
  misc_feature 1..18: note = Probe
  source 1..18: mol_type = other DNA
gcccggatagctcagtcg

SEQ ID NO: 51500 - DNA, 19 bp, synthetic construct
  misc_feature 1..19: note = Probe
  source 1..19: mol_type = other DNA
gcccggatagctcagtcgg

SEQ ID NO: 51501 - DNA, 21 bp, synthetic construct
  misc_feature 1..21: note = Probe
  source 1..21: mol_type = other DNA
gcccggatagctcagtcggta

SEQ ID NO: 51502 - DNA, 22 bp, synthetic construct
  misc_feature 1..22: note = Probe
  source 1..22: mol_type = other DNA
gcccggatagctcagtcggtag

SEQ ID NO: 51503 - DNA, 23 bp, synthetic construct
  misc_feature 1..23: note = Probe
  source 1..23: mol_type = other DNA
gcccggatagctcagtcggtaga

SEQ ID NO: 51504 - DNA, 25 bp, synthetic construct
  misc_feature 1..25: note = Probe
  source 1..25: mol_type = other DNA
gcccggatagctcagtcggtagagc

SEQ ID NO: 51505 - DNA, 26 bp, synthetic construct
  misc_feature 1..26: note = Probe
  source 1..26: mol_type = other DNA
gcccggatagctcagtcggtagagca

SEQ ID NO: 51506 - DNA, 27 bp, synthetic construct
  misc_feature 1..27: note = Probe
  source 1..27: mol_type = other DNA
gcccggatagctcagtcggtagagcat

SEQ ID NO: 51507 - DNA, 29 bp, synthetic construct
  misc_feature 1..29: note = Probe
  source 1..29: mol_type = other DNA
gcccggatagctcagtcggtagagcatca

SEQ ID NO: 51508 - DNA, 30 bp, synthetic construct; identical to SEQ ID NO: 1038
  misc_feature 1..30: note = Probe
  source 1..30: mol_type = other DNA

SEQ ID NO: 51509 - DNA, 31 bp, synthetic construct; identical to SEQ ID NO: 1039
  misc_feature 1..31: note = Probe
  source 1..31: mol_type = other DNA

SEQ ID NO: 51510 - DNA, 32 bp, synthetic construct; identical to SEQ ID NO: 1040
  misc_feature 1..32: note = Probe
  source 1..32: mol_type = other DNA

SEQ ID NO: 51511 - DNA, 33 bp, synthetic construct; identical to SEQ ID NO: 1041
  misc_feature 1..33: note = Probe
  source 1..33: mol_type = other DNA

SEQ ID NO: 51512 - DNA, 34 bp, synthetic construct; identical to SEQ ID NO: 1042
  misc_feature 1..34: note = Probe
  source 1..34: mol_type = other DNA

SEQ ID NO: 51513 - DNA, 35 bp, synthetic construct; identical to SEQ ID NO: 1043
  misc_feature 1..35: note = Probe
  source 1..35: mol_type = other DNA

SEQ ID NO: 51514 - DNA, 36 bp, synthetic construct; identical to SEQ ID NO: 1044
  misc_feature 1..36: note = Probe
  source 1..36: mol_type = other DNA

SEQ ID NO: 51515 - DNA, 16 bp, synthetic construct
  misc_feature 1..16: note = Probe
  source 1..16: mol_type = other DNA
gcccggctagctcagt

SEQ ID NO: 51516 - DNA, 17 bp, synthetic construct
  misc_feature 1..17: note = Probe
  source 1..17: mol_type = other DNA
gcccggctagctcagtc

SEQ ID NO: 51517 - DNA, 18 bp, synthetic construct
  misc_feature 1..18: note = Probe
  source 1..18: mol_type = other DNA
gcccggctagctcagtcg

SEQ ID NO: 51518 - DNA, 21 bp, synthetic construct
  misc_feature 1..21: note = Probe
  source 1..21: mol_type = other DNA
gcccggctagctcagtcggta

SEQ ID NO: 51519 - DNA, 22 bp, synthetic construct
  misc_feature 1..22: note = Probe
  source 1..22: mol_type = other DNA
gcccggctagctcagtcggtag

SEQ ID NO: 51520 - DNA, 23 bp, synthetic construct
  misc_feature 1..23: note = Probe
  source 1..23: mol_type = other DNA
gcccggctagctcagtcggtaga

SEQ ID NO: 51521 - DNA, 24 bp, synthetic construct
  misc_feature 1..24: note = Probe
  source 1..24: mol_type = other DNA
gcccggctagctcagtcggtagag

SEQ ID NO: 51522 - DNA, 25 bp, synthetic construct
  misc_feature 1..25: note = Probe
  source 1..25: mol_type = other DNA
gcccggctagctcagtcggtagagc

SEQ ID NO: 51523 - DNA, 26 bp, synthetic construct
  misc_feature 1..26: note = Probe
  source 1..26: mol_type = other DNA
gcccggctagctcagtcggtagagca

SEQ ID NO: 51524 - DNA, 27 bp, synthetic construct
  misc_feature 1..27: note = Probe
  source 1..27: mol_type = other DNA
gcccggctagctcagtcggtagagcat

SEQ ID NO: 51525 - DNA, 28 bp, synthetic construct
  misc_feature 1..28: note = Probe
  source 1..28: mol_type = other DNA
gcccggctagctcagtcggtagagcatg

SEQ ID NO: 51526 - DNA, 29 bp, synthetic construct
  misc_feature 1..29: note = Probe
  source 1..29: mol_type = other DNA
gcccggctagctcagtcggtagagcatga

SEQ ID NO: 51527 - DNA, 30 bp, synthetic construct; identical to SEQ ID NO: 1062
  misc_feature 1..30: note = Probe
  source 1..30: mol_type = other DNA

SEQ ID NO: 51528 - DNA, 31 bp, synthetic construct; identical to SEQ ID NO: 1063
  misc_feature 1..31: note = Probe
  source 1..31: mol_type = other DNA

SEQ ID NO: 51529 - DNA, 32 bp, synthetic construct; identical to SEQ ID NO: 1064
  misc_feature 1..32: note = Probe
  source 1..32: mol_type = other DNA

SEQ ID NO: 51530 - DNA, 33 bp, synthetic construct; identical to SEQ ID NO: 1070
  misc_feature 1..33: note = Probe
  source 1..33: mol_type = other DNA

SEQ ID NO: 51531 - DNA, 34 bp, synthetic construct; identical to SEQ ID NO: 1071
  misc_feature 1..34: note = Probe
  source 1..34: mol_type = other DNA

SEQ ID NO: 51532 - DNA, 36 bp, synthetic construct; identical to SEQ ID NO: 1073
  misc_feature 1..36: note = Probe
  source 1..36: mol_type = other DNA

SEQ ID NO: 51533 - DNA, 40 bp, synthetic construct; identical to SEQ ID NO: 1076
  misc_feature 1..40: note = Probe
  source 1..40: mol_type = other DNA

SEQ ID NO: 51534 - DNA, 42 bp, synthetic construct; identical to SEQ ID NO: 1077
  misc_feature 1..42: note = Probe
  source 1..42: mol_type = other DNA

SEQ ID NO: 51535 - DNA, 50 bp, synthetic construct; identical to SEQ ID NO: 1078
  misc_feature 1..50: note = Probe
  source 1..50: mol_type = other DNA

SEQ ID NO: 51536 - DNA, 29 bp, synthetic construct
  misc_feature 1..29: note = Probe
  source 1..29: mol_type = other DNA
gcccggctagctcagtcggtagagcatgg

SEQ ID NO: 51537 - DNA, 30 bp, synthetic construct; identical to SEQ ID NO: 1080
  misc_feature 1..30: note = Probe
  source 1..30: mol_type = other DNA

SEQ ID NO: 51538 - DNA, 31 bp, synthetic construct; identical to SEQ ID NO: 1081
  misc_feature 1..31: note = Probe
  source 1..31: mol_type = other DNA

SEQ ID NO: 51539 - DNA, 32 bp, synthetic construct; identical to SEQ ID NO: 1082
  misc_feature 1..32: note = Probe
  source 1..32: mol_type = other DNA

SEQ ID NO: 51540 - DNA, 33 bp, synthetic construct; identical to SEQ ID NO: 1083
  misc_feature 1..33: note = Probe
  source 1..33: mol_type = other DNA

SEQ ID NO: 51541 - DNA, 34 bp, synthetic construct; identical to SEQ ID NO: 1084
  misc_feature 1..34: note = Probe
  source 1..34: mol_type = other DNA

SEQ ID NO: 51542 - DNA, 35 bp, synthetic construct; identical to SEQ ID NO: 1085
  misc_feature 1..35: note = Probe
  source 1..35: mol_type = other DNA

SEQ ID NO: 51543 - DNA, 36 bp, synthetic construct; identical to SEQ ID NO: 1086
  misc_feature 1..36: note = Probe
  source 1..36: mol_type = other DNA

SEQ ID NO: 51544 - DNA, 42 bp, synthetic construct; identical to SEQ ID NO: 1089
  misc_feature 1..42: note = Probe
  source 1..42: mol_type = other DNA

SEQ ID NO: 51545 - DNA, 45 bp, synthetic construct; identical to SEQ ID NO: 1090
  misc_feature 1..45: note = Probe
  source 1..45: mol_type = other DNA

SEQ ID NO: 51546 - DNA, 49 bp, synthetic construct; identical to SEQ ID NO: 6006
  misc_feature 1..49: note = Probe
  source 1..49: mol_type = other DNA

SEQ ID NO: 51547 - DNA, 50 bp, synthetic construct; identical to SEQ ID NO: 1091
  misc_feature 1..50: note = Probe
  source 1..50: mol_type = other DNA

SEQ ID NO: 51548 - DNA, 30 bp, synthetic construct; identical to SEQ ID NO: 1105
  misc_feature 1..30: note = Probe
  source 1..30: mol_type = other DNA

SEQ ID NO: 51549 - DNA, 25 bp, synthetic construct
  misc_feature 1..25: note = Probe
  source 1..25: mol_type = other DNA
gcctcctaagccagggattgtgggt

SEQ ID NO: 51550 - DNA, 32 bp, synthetic construct; identical to SEQ ID NO: 1112
  misc_feature 1..32: note = Probe
  source 1..32: mol_type = other DNA

SEQ ID NO: 51551 - DNA, 31 bp, synthetic construct; identical to SEQ ID NO: 1115
  misc_feature 1..31: note = Probe
  source 1..31: mol_type = other DNA

SEQ ID NO: 51552 - DNA, 31 bp, synthetic construct; identical to SEQ ID NO: 1126
  misc_feature 1..31: note = Probe
  source 1..31: mol_type = other DNA

SEQ ID NO: 51553 - DNA, 24 bp, synthetic construct
  misc_feature 1..24: note = Probe
  source 1..24: mol_type = other DNA
gcctgtcacgcgggagaccggggt

SEQ ID NO: 51554 - DNA, 16 bp, synthetic construct
  misc_feature 1..16: note = Probe
  source 1..16: mol_type = other DNA
gcgaaaggtccccggt

SEQ ID NO: 51555 - DNA, 17 bp, synthetic construct
  misc_feature 1..17: note = Probe
  source 1..17: mol_type = other DNA
gcgccgctggtgtagtg

SEQ ID NO: 51556 - DNA, 20 bp, synthetic construct
  misc_feature 1..20: note = Probe
  source 1..20: mol_type = other DNA
gcgccgctggtgtagtggta

SEQ ID NO: 51557 - DNA, 21 bp, synthetic construct
  misc_feature 1..21: note = Probe
  source 1..21: mol_type = other DNA
gcgccgctggtgtagtggtat

SEQ ID NO: 51558 - DNA, 22 bp, synthetic construct
  misc_feature 1..22: note = Probe
  source 1..22: mol_type = other DNA
gcgccgctggtgtagtggtatc

SEQ ID NO: 51559 - DNA, 23 bp, synthetic construct
  misc_feature 1..23: note = Probe
  source 1..23: mol_type = other DNA
gcgccgctggtgtagtggtatca

SEQ ID NO: 51560 - DNA, 25 bp, synthetic construct
  misc_feature 1..25: note = Probe
  source 1..25: mol_type = other DNA
gcgccgctggtgtagtggtatcatg

SEQ ID NO: 51561 - DNA, 26 bp, synthetic construct
  misc_feature 1..26: note = Probe
  source 1..26: mol_type = other DNA
gcgccgctggtgtagtggtatcatgc

SEQ ID NO: 51562 - DNA, 27 bp, synthetic construct
  misc_feature 1..27: note = Probe
  source 1..27: mol_type = other DNA
gcgccgctggtgtagtggtatcatgca

SEQ ID NO: 51563 - DNA, 28 bp, synthetic construct
  misc_feature 1..28: note = Probe
  source 1..28: mol_type = other DNA
gcgccgctggtgtagtggtatcatgcaa

SEQ ID NO: 51564 - DNA, 29 bp, synthetic construct
  misc_feature 1..29: note = Probe
  source 1..29: mol_type = other DNA
gcgccgctggtgtagtggtatcatgcaag

SEQ ID NO: 51565 - DNA, 30 bp, synthetic construct; identical to SEQ ID NO: 1149
  misc_feature 1..30: note = Probe
  source 1..30: mol_type = other DNA

SEQ ID NO: 51566 - DNA, 31 bp, synthetic construct; identical to SEQ ID NO: 1150
  misc_feature 1..31: note = Probe
  source 1..31: mol_type = other DNA

SEQ ID NO: 51567 - DNA, 32 bp, synthetic construct; identical to SEQ ID NO: 1151
  misc_feature 1..32: note = Probe
  source 1..32: mol_type = other DNA

SEQ ID NO: 51568 - DNA, 33 bp, synthetic construct; identical to SEQ ID NO: 1152
  misc_feature 1..33: note = Probe
  source 1..33: mol_type = other DNA

SEQ ID NO: 51569 - DNA, 34 bp, synthetic construct; identical to SEQ ID NO: 1153
  misc_feature 1..34: note = Probe
  source 1..34: mol_type = other DNA

SEQ ID NO: 51570 - DNA, 35 bp, synthetic construct; identical to SEQ ID NO: 1154
  misc_feature 1..35: note = Probe
  source 1..35: mol_type = other DNA

SEQ ID NO: 51571 - DNA, 36 bp, synthetic construct; identical to SEQ ID NO: 1155
  misc_feature 1..36: note = Probe
  source 1..36: mol_type = other DNA

SEQ ID NO: 51572 - DNA, 37 bp, synthetic construct; identical to SEQ ID NO: 1156
  misc_feature 1..37: note = Probe
  source 1..37: mol_type = other DNA

SEQ ID NO: 51573 - DNA, 39 bp, synthetic construct; identical to SEQ ID NO: 1157
  misc_feature 1..39: note = Probe
  source 1..39: mol_type = other DNA

SEQ ID NO: 51574 - DNA, 40 bp, synthetic construct; identical to SEQ ID NO: 1158
  misc_feature 1..40: note = Probe
  source 1..40: mol_type = other DNA

SEQ ID NO: 51575 - DNA, 41 bp, synthetic construct; identical to SEQ ID NO: 1159
  misc_feature 1..41: note = Probe
  source 1..41: mol_type = other DNA

SEQ ID NO: 51576 - DNA, 44 bp, synthetic construct; identical to SEQ ID NO: 6092
  misc_feature 1..44: note = Probe
  source 1..44: mol_type = other DNA

SEQ ID NO: 51577 - DNA, 45 bp, synthetic construct; identical to SEQ ID NO: 6093
  misc_feature 1..45: note = Probe
  source 1..45: mol_type = other DNA

SEQ ID NO: 51578 - DNA, 46 bp, synthetic construct; identical to SEQ ID NO: 1160
  misc_feature 1..46: note = Probe
  source 1..46: mol_type = other DNA

SEQ ID NO: 51579 - DNA, 49 bp, synthetic construct; identical to SEQ ID NO: 6096
  misc_feature 1..49: note = Probe
  source 1..49: mol_type = other DNA

SEQ ID NO: 51580 - DNA, 50 bp, synthetic construct; identical to SEQ ID NO: 1161
  misc_feature 1..50: note = Probe
  source 1..50: mol_type = other DNA

SEQ ID NO: 51581 - DNA, 21 bp, synthetic construct
  misc_feature 1..21: note = Probe
  source 1..21: mol_type = other DNA
gcgctctcaccgccgcggccc

SEQ ID NO: 51582 - DNA, 35 bp, synthetic construct; identical to SEQ ID NO: 1188
  misc_feature 1..35: note = Probe
  source 1..35: mol_type = other DNA

SEQ ID NO: 51583 - DNA, 44 bp, synthetic construct; identical to SEQ ID NO: 1191
  misc_feature 1..44: note = Probe
  source 1..44: mol_type = other DNA

SEQ ID NO: 51584 - DNA, 50 bp, synthetic construct; identical to SEQ ID NO: 1192
  misc_feature 1..50: note = Probe
  source 1..50: mol_type = other DNA

SEQ ID NO: 51585 - DNA, 44 bp, synthetic construct; identical to SEQ ID NO: 1194
  misc_feature 1..44: note = Probe
  source 1..44: mol_type = other DNA

SEQ ID NO: 51586 - DNA, 50 bp, synthetic construct; identical to SEQ ID NO: 1195
  misc_feature 1..50: note = Probe
  source 1..50: mol_type = other DNA

SEQ ID NO: 51587 - DNA, 44 bp, synthetic construct; identical to SEQ ID NO: 1196
  misc_feature 1..44: note = Probe
  source 1..44: mol_type = other DNA

SEQ ID NO: 51588 - DNA, 50 bp, synthetic construct; identical to SEQ ID NO: 1197
  misc_feature 1..50: note = Probe
  source 1..50: mol_type = other DNA

SEQ ID NO: 51589 - DNA, 26 bp, synthetic construct
  misc_feature 1..26: note = Probe
  source 1..26: mol_type = other DNA
gctagctcagtcggtagagcatggga

SEQ ID NO: 51590 - DNA, 27 bp, synthetic construct
  misc_feature 1..27: note = Probe
  source 1..27: mol_type = other DNA
gctagctcagtcggtagagcatgggac

SEQ ID NO: 51591 - DNA, 28 bp, synthetic construct
  misc_feature 1..28: note = Probe
  source 1..28: mol_type = other DNA
gctagctcagtcggtagagcatgggact

SEQ ID NO: 51592 - DNA, 19 bp, synthetic construct
  misc_feature 1..19: note = Probe
  source 1..19: mol_type = other DNA
gctctcaccgccgcggccc

SEQ ID NO: 51593 - DNA, 37 bp, synthetic construct; identical to SEQ ID NO: 6324
  misc_feature 1..37: note = Probe
  source 1..37: mol_type = other DNA

SEQ ID NO: 51594 - DNA, 39 bp, synthetic construct; identical to SEQ ID NO: 21333
  misc_feature 1..39: note = Probe
  source 1..39: mol_type = other DNA

SEQ ID NO: 51595 - DNA, 40 bp, synthetic construct
  misc_feature 1..40: note = Probe
  source 1..40: mol_type = other DNA
gcttctgtagtgtagtggttatcacgttcgcctcacacgc

SEQ ID NO: 51596 - DNA, 41 bp, synthetic construct
  misc_feature 1..41: note = Probe
  source 1..41: mol_type = other DNA
gcttctgtagtgtagtggttatcacgttcgcctcacacgcg

SEQ ID NO: 51597 - DNA, 50 bp, synthetic construct; identical to SEQ ID NO: 1219
  misc_feature 1..50: note = Probe
  source 1..50: mol_type = other DNA

SEQ ID NO: 51598 - DNA, 27 bp, synthetic construct
  misc_feature 1..27: note = Probe
  source 1..27: mol_type = other DNA
ggatagctcagtcggtagagcatcaga

SEQ ID NO: 51599 - DNA, 28 bp, synthetic construct
  misc_feature 1..28: note = Probe
  source 1..28: mol_type = other DNA
ggattcctggttttcacccaggcggccc

SEQ ID NO: 51600 - DNA, 28 bp, synthetic construct
  misc_feature 1..28: note = Probe
  source 1..28: mol_type = other DNA
ggattcctggttttcacccaggtggccc

SEQ ID NO: 51601 - DNA, 16 bp, synthetic construct
  misc_feature 1..16: note = Probe
  source 1..16: mol_type = other DNA
ggattcggcgctctca

SEQ ID NO: 51602 - DNA, 23 bp, synthetic construct
  misc_feature 1..23: note = Probe
  source 1..23: mol_type = other DNA
ggattcggcgctctcaccgccgc

SEQ ID NO: 51603 - DNA, 24 bp, synthetic construct
  misc_feature 1..24: note = Probe
  source 1..24: mol_type = other DNA
ggattcggcgctctcaccgccgcg

SEQ ID NO: 51604 - DNA, 25 bp, synthetic construct
  misc_feature 1..25: note = Probe
  source 1..25: mol_type = other DNA
ggattcggcgctctcaccgccgcgg

SEQ ID NO: 51605 - DNA, 27 bp, synthetic construct
  misc_feature 1..27: note = Probe
  source 1..27: mol_type = other DNA
ggattcggcgctctcaccgccgcggcc

SEQ ID NO: 51606 - DNA, 28 bp, synthetic construct
  misc_feature 1..28: note = Probe
  source 1..28: mol_type = other DNA
ggattcggcgctctcaccgccgcggccc

SEQ ID NO: 51607 - DNA, 29 bp, synthetic construct
  misc_feature 1..29: note = Probe
  source 1..29: mol_type = other DNA
ggattcggcgctctcaccgccgcggcccg

SEQ ID NO: 51608 - DNA, 27 bp, synthetic construct
  misc_feature 1..27: note = Probe
  source 1..27: mol_type = other DNA
ggctagctcagtcggtagagcatgaga

SEQ ID NO: 51609 - DNA, 28 bp, synthetic construct
  misc_feature 1..28: note = Probe
  source 1..28: mol_type = other DNA
ggctagctcagtcggtagagcatgagac

SEQ ID NO: 51610 - DNA, 27 bp, synthetic construct
  misc_feature 1..27: note = Probe
  source 1..27: mol_type = other DNA
ggctagctcagtcggtagagcatggga

SEQ ID NO: 51611 - DNA, 28 bp, synthetic construct
  misc_feature 1..28: note = Probe
  source 1..28: mol_type = other DNA
ggctagctcagtcggtagagcatgggac

SEQ ID NO: 51612 - DNA, 29 bp, synthetic construct
  misc_feature 1..29: note = Probe
  source 1..29: mol_type = other DNA
ggctagctcagtcggtagagcatgggact

SEQ ID NO: 51613 - DNA, 30 bp, synthetic construct; identical to SEQ ID NO: 1292
  misc_feature 1..30: note = Probe
  source 1..30: mol_type = other DNA

SEQ ID NO: 51614 - DNA, 28 bp, synthetic construct
  misc_feature 1..28: note = Probe
  source 1..28: mol_type = other DNA
ggctccgtggcgcaatggatagcgcatt

SEQ ID NO: 51615 - DNA, 30 bp, synthetic construct; identical to SEQ ID NO: 10704
  misc_feature 1..30: note = Probe
  source 1..30: mol_type = other DNA

SEQ ID NO: 51616 - DNA, 30 bp, synthetic construct; identical to SEQ ID NO: 1335
  misc_feature 1..30: note = Probe
  source 1..30: mol_type = other DNA

SEQ ID NO: 51617 - DNA, 30 bp, synthetic construct; identical to SEQ ID NO: 1367
  misc_feature 1..30: note = Probe
  source 1..30: mol_type = other DNA

SEQ ID NO: 51618 - DNA, 17 bp, synthetic construct
  misc_feature 1..17: note = Probe
  source 1..17: mol_type = other DNA
ggggtatgattctcggt

SEQ ID NO: 51619 - DNA, 16 bp, synthetic construct
  misc_feature 1..16: note = Probe
  source 1..16: mol_type = other DNA
gggtatgattctcggt

SEQ ID NO: 51620 - DNA, 16 bp, synthetic construct
  misc_feature 1..16: note = Probe
  source 1..16: mol_type = other DNA
gggtgcgagaggtccc

SEQ ID NO: 51621 - DNA, 32 bp, synthetic construct; identical to SEQ ID NO: 6703
  misc_feature 1..32: note = Probe
  source 1..32: mol_type = other DNA

SEQ ID NO: 51622 - DNA, 25 bp, synthetic construct
  misc_feature 1..25: note = Probe
  source 1..25: mol_type = other DNA
ggtagagcatgggactcttaatccc

SEQ ID NO: 51623 - DNA, 22 bp, synthetic construct
  misc_feature 1..22: note = Probe
  source 1..22: mol_type = other DNA
ggtagcgtggccgagcggtcta

SEQ ID NO: 51624 - DNA, 32 bp, synthetic construct; identical to SEQ ID NO: 13915
  misc_feature 1..32: note = Probe
  source 1..32: mol_type = other DNA

SEQ ID NO: 51625 - DNA, 33 bp, synthetic construct; identical to SEQ ID NO: 22104
  misc_feature 1..33: note = Probe
  source 1..33: mol_type = other DNA

SEQ ID NO: 51626 - DNA, 33 bp, synthetic construct; identical to SEQ ID NO: 1407
  misc_feature 1..33: note = Probe
  source 1..33: mol_type = other DNA

SEQ ID NO: 51627 - DNA, 50 bp, synthetic construct; identical to SEQ ID NO: 1417
  misc_feature 1..50: note = Probe
  source 1..50: mol_type = other DNA

SEQ ID NO: 51628 - DNA, 33 bp, synthetic construct; identical to SEQ ID NO: 13931
  misc_feature 1..33: note = Probe
  source 1..33: mol_type = other DNA

SEQ ID NO: 51629 - DNA, 34 bp, synthetic construct; identical to SEQ ID NO: 13935
  misc_feature 1..34: note = Probe
  source 1..34: mol_type = other DNA

SEQ ID NO: 51630 - DNA, 21 bp, synthetic construct
  misc_feature 1..21: note = Probe
  source 1..21: mol_type = other DNA
ggttaggattcggcgctctca

SEQ ID NO: 51631 - DNA, 33 bp, synthetic construct; identical to SEQ ID NO: 22258
  misc_feature 1..33: note = Probe
  source 1..33: mol_type = other DNA

SEQ ID NO: 51632 - DNA, 31 bp, synthetic construct; identical to SEQ ID NO: 13956
  misc_feature 1..31: note = Probe
  source 1..31: mol_type = other DNA

SEQ ID NO: 51633 - DNA, 23 bp, synthetic construct
  misc_feature 1..23: note = Probe
  source 1..23: mol_type = other DNA
ggttccatagtgtagtggttatc

SEQ ID NO: 51634 - DNA, 28 bp, synthetic construct
  misc_feature 1..28: note = Probe
  source 1..28: mol_type = other DNA
ggttccatagtgtagtggttatcacgtc

SEQ ID NO: 51635 - DNA, 31 bp, synthetic construct; identical to SEQ ID NO: 1452
  misc_feature 1..31: note = Probe
  source 1..31: mol_type = other DNA

SEQ ID NO: 51636 - DNA, 50 bp, synthetic construct; identical to SEQ ID NO: 1457
  misc_feature 1..50: note = Probe
  source 1..50: mol_type = other DNA

SEQ ID NO: 51637 - DNA, 18 bp, synthetic construct
  misc_feature 1..18: note = Probe
  source 1..18: mol_type = other DNA
gtaaaccaggggtcgcga

SEQ ID NO: 51638 - DNA, 36 bp, synthetic construct; identical to SEQ ID NO: 14013
  misc_feature 1..36: note = Probe
  source 1..36: mol_type = other DNA

SEQ ID NO: 51639 - DNA, 32 bp, synthetic construct; identical to SEQ ID NO: 1473
  misc_feature 1..32: note = Probe
  source 1..32: mol_type = other DNA

SEQ ID NO: 51640 - DNA, 17 bp, synthetic construct
  misc_feature 1..17: note = Probe
  source 1..17: mol_type = other DNA
gtccttgtagtataaac

SEQ ID NO: 51641 - DNA, 18 bp, synthetic construct
  misc_feature 1..18: note = Probe
  source 1..18: mol_type = other DNA
gtccttgtagtataaact

SEQ ID NO: 51642 - DNA, 19 bp, synthetic construct
  misc_feature 1..19: note = Probe
  source 1..19: mol_type = other DNA
gtccttgtagtataaacta

SEQ ID NO: 51643 - DNA, 29 bp, synthetic construct
  misc_feature 1..29: note = Probe
  source 1..29: mol_type = other DNA
gtccttgtagtataaactaatacaccagt

SEQ ID NO: 51644 - DNA, 17 bp, synthetic construct
  misc_feature 1..17: note = Probe
  source 1..17: mol_type = other DNA
gtcggtagagcatcaga

SEQ ID NO: 51645 - DNA, 17 bp, synthetic construct
  misc_feature 1..17: note = Probe
  source 1..17: mol_type = other DNA
gtcggtagagcatggga

SEQ ID NO: 51646 - DNA, 18 bp, synthetic construct
  misc_feature 1..18: note = Probe
  source 1..18: mol_type = other DNA
gtcggtagagcatgggac

SEQ ID NO: 51647 - DNA, 23 bp, synthetic construct
  misc_feature 1..23: note = Probe
  source 1..23: mol_type = other DNA
gtctcataatctgaaggtcgtga

SEQ ID NO: 51648 - DNA, 25 bp, synthetic construct
  misc_feature 1..25: note = Probe
  source 1..25: mol_type = other DNA
gtctcataatctgaaggtcgtgagt

SEQ ID NO: 51649 - DNA, 32 bp, synthetic construct; identical to SEQ ID NO: 14072
  misc_feature 1..32: note = Probe
  source 1..32: mol_type = other DNA

SEQ ID NO: 51650 - DNA, 19 bp, synthetic construct
  misc_feature 1..19: note = Probe
  source 1..19: mol_type = other DNA
gtgagtatccccgcctgtc

SEQ ID NO: 51651 - DNA, 33 bp, synthetic construct; identical to SEQ ID NO: 14079
  misc_feature 1..33: note = Probe
  source 1..33: mol_type = other DNA

SEQ ID NO: 51652 - DNA, 17 bp, synthetic construct
  misc_feature 1..17: note = Probe
  source 1..17: mol_type = other DNA
gtggttaggattcggcg

SEQ ID NO: 51653 - DNA, 18 bp, synthetic construct
  misc_feature 1..18: note = Probe
  source 1..18: mol_type = other DNA
gtggttaggattcggcgc

SEQ ID NO: 51654 - DNA, 19 bp, synthetic construct
  misc_feature 1..19: note = Probe
  source 1..19: mol_type = other DNA
gtggttaggattcggcgct

SEQ ID NO: 51655 - DNA, 23 bp, synthetic construct
  misc_feature 1..23: note = Probe
  source 1..23: mol_type = other DNA
gtggttaggattcggcgctctca

SEQ ID NO: 51656 - DNA, 30 bp, synthetic construct; identical to SEQ ID NO: 22854
  misc_feature 1..30: note = Probe
  source 1..30: mol_type = other DNA

SEQ ID NO: 51657 - DNA, 35 bp, synthetic construct; identical to SEQ ID NO: 14107
  misc_feature 1..35: note = Probe
  source 1..35: mol_type = other DNA

SEQ ID NO: 51658 - DNA, 38 bp, synthetic construct; identical to SEQ ID NO: 22935
  misc_feature 1..38: note = Probe
  source 1..38: mol_type = other DNA

SEQ ID NO: 51659 - DNA, 30 bp, synthetic construct; identical to SEQ ID NO: 1521
  misc_feature 1..30: note = Probe
  source 1..30: mol_type = other DNA

SEQ ID NO: 51660 - DNA, 37 bp, synthetic construct; identical to SEQ ID NO: 1523
  misc_feature 1..37: note = Probe
  source 1..37: mol_type = other DNA

SEQ ID NO: 51661 - DNA, 34 bp, synthetic construct; identical to SEQ ID NO: 1538
  misc_feature 1..34: note = Probe
  source 1..34: mol_type = other DNA

SEQ ID NO: 51662 - DNA, 28 bp, synthetic construct
  misc_feature 1..28: note = Probe
  source 1..28: mol_type = other DNA
gtttccgtagtgtagcggttatcacatt

SEQ ID NO: 51663 - DNA, 28 bp, synthetic construct
  misc_feature 1..28: note = Probe
  source 1..28: mol_type = other DNA
gtttccgtagtgtagtggtcatcacgtt

SEQ ID NO: 51664 - DNA, 31 bp, synthetic construct; identical to SEQ ID NO: 1559
  misc_feature 1..31: note = Probe
  source 1..31: mol_type = other DNA

SEQ ID NO: 51665 - DNA, 32 bp, synthetic construct; identical to SEQ ID NO: 1560
  misc_feature 1..32: note = Probe
  source 1..32: mol_type = other DNA

SEQ ID NO: 51666 - DNA, 44 bp, synthetic construct
  misc_feature 1..44: note = Probe
  source 1..44: mol_type = other DNA
gtttccgtagtgtagtggttatcacgttcgcctcacacgcgaaa

SEQ ID NO: 51667 - DNA, 50 bp, synthetic construct; identical to SEQ ID NO: 1564
  misc_feature 1..50: note = Probe
  source 1..50: mol_type = other DNA

SEQ ID NO: 51668 - DNA, 50 bp, synthetic construct; identical to SEQ ID NO: 1569
  misc_feature 1..50: note = Probe
  source 1..50: mol_type = other DNA

SEQ ID NO: 51669 - DNA, 18 bp, synthetic construct
  misc_feature 1..18: note = Probe
  source 1..18: mol_type = other DNA
tacctcctcaaagcaata

SEQ ID NO: 51670 - DNA, 37 bp, synthetic construct; identical to SEQ ID NO: 23457
  misc_feature 1..37: note = Probe
  source 1..37: mol_type = other DNA

SEQ ID NO: 51671 - DNA, 24 bp, synthetic construct
  misc_feature 1..24: note = Probe
  source 1..24: mol_type = other DNA
tagctcagtcggtagagcatggga

SEQ ID NO: 51672 - DNA, 18 bp, synthetic construct
  misc_feature 1..18: note = Probe
  source 1..18: mol_type = other DNA
taggggtatgattctcgg

SEQ ID NO: 51673 - DNA, 19 bp, synthetic construct
  misc_feature 1..19: note = Probe
  source 1..19: mol_type = other DNA
taggggtatgattctcggt

SEQ ID NO: 51674 - DNA, 24 bp, synthetic construct
  misc_feature 1..24: note = Probe
  source 1..24: mol_type = other DNA
tagtggtgagtatccccgcctgtc

SEQ ID NO: 51675 - DNA, 19 bp, synthetic construct
  misc_feature 1..19: note = Probe
  source 1..19: mol_type = other DNA
tagtggttaggattcggcg

SEQ ID NO: 51676 - DNA, 20 bp, synthetic construct
  misc_feature 1..20: note = Probe
  source 1..20: mol_type = other DNA
tagtggttaggattcggcgc

SEQ ID NO: 51677 - DNA, 21 bp, synthetic construct
  misc_feature 1..21: note = Probe
  source 1..21: mol_type = other DNA
tagtggttaggattcggcgct

SEQ ID NO: 51678 - DNA, 25 bp, synthetic construct
  misc_feature 1..25: note = Probe
  source 1..25: mol_type = other DNA
tagtggttaggattcggcgctctca

SEQ ID NO: 51679 - DNA, 26 bp, synthetic construct
  misc_feature 1..26: note = Probe
  source 1..26: mol_type = other DNA
tagtggttaggattcggcgctctcac

SEQ ID NO: 51680 - DNA, 30 bp, synthetic construct; identical to SEQ ID NO: 23547
  misc_feature 1..30: note = Probe
  source 1..30: mol_type = other DNA

SEQ ID NO: 51681 - DNA, 32 bp, synthetic construct; identical to SEQ ID NO: 23548
  misc_feature 1..32: note = Probe
  source 1..32: mol_type = other DNA

SEQ ID NO: 51682 - DNA, 36 bp, synthetic construct; identical to SEQ ID NO: 23550
  misc_feature 1..36: note = Probe
  source 1..36: mol_type = other DNA

SEQ ID NO: 51683 - DNA, 37 bp, synthetic construct; identical to SEQ ID NO: 14220
  misc_feature 1..37: note = Probe
  source 1..37: mol_type = other DNA

SEQ ID NO: 51684 - DNA, 38 bp, synthetic construct; identical to SEQ ID NO: 14221
  misc_feature 1..38: note = Probe
  source 1..38: mol_type = other DNA

SEQ ID NO: 51685 - DNA, 19 bp, synthetic construct
  misc_feature 1..19: note = Probe
  source 1..19: mol_type = other DNA
tagtggttagtactctgcg

SEQ ID NO: 51686 - DNA, 18 bp, synthetic construct
  misc_feature 1..18: note = Probe
  source 1..18: mol_type = other DNA
tagtggttagtatccccg

SEQ ID NO: 51687 - DNA, 19 bp, synthetic construct
  misc_feature 1..19: note = Probe
  source 1..19: mol_type = other DNA
tagtggttagtatccccgc

SEQ ID NO: 51688 - DNA, 22 bp, synthetic construct
  misc_feature 1..22: note = Probe
  source 1..22: mol_type = other DNA
tcaatccccggcacctccacca

SEQ ID NO: 51689 - DNA, 50 bp, synthetic construct; identical to SEQ ID NO: 1610
  misc_feature 1..50: note = Probe
  source 1..50: mol_type = other DNA

SEQ ID NO: 51690 - DNA, 18 bp, synthetic construct
  misc_feature 1..18: note = Probe
  source 1..18: mol_type = other DNA
tcacacgcgaaaggtccc

SEQ ID NO: 51691 - DNA, 22 bp, synthetic construct
  misc_feature 1..22: note = Probe
  source 1..22: mol_type = other DNA
tcacacgcgaaaggtccccggt

SEQ ID NO: 51692 - DNA, 16 bp, synthetic construct
  misc_feature 1..16: note = Probe
  source 1..16: mol_type = other DNA
tccagcgatccgagtt

SEQ ID NO: 51693 - DNA, 22 bp, synthetic construct
  misc_feature 1..22: note = Probe
  source 1..22: mol_type = other DNA
tcccacatggtctagcggttag

SEQ ID NO: 51694 - DNA, 23 bp, synthetic construct
  misc_feature 1..23: note = Probe
  source 1..23: mol_type = other DNA
tcccacatggtctagcggttagg

SEQ ID NO: 51695 - DNA, 24 bp, synthetic construct
  misc_feature 1..24: note = Probe
  source 1..24: mol_type = other DNA
tcccacatggtctagcggttagga

SEQ ID NO: 51696 - DNA, 25 bp, synthetic construct
  misc_feature 1..25: note = Probe
  source 1..25: mol_type = other DNA
tcccacatggtctagcggttaggat

SEQ ID NO: 51697 - DNA, 26 bp, synthetic construct
  misc_feature 1..26: note = Probe
  source 1..26: mol_type = other DNA
tcccacatggtctagcggttaggatt

SEQ ID NO: 51698 - DNA, 27 bp, synthetic construct
  misc_feature 1..27: note = Probe
  source 1..27: mol_type = other DNA
tcccacatggtctagcggttaggattc

SEQ ID NO: 51699 - DNA, 28 bp, synthetic construct
  misc_feature 1..28: note = Probe
  source 1..28: mol_type = other DNA
tcccacatggtctagcggttaggattcc

SEQ ID NO: 51700 - DNA, 29 bp, synthetic construct
  misc_feature 1..29: note = Probe
  source 1..29: mol_type = other DNA
tcccacatggtctagcggttaggattcct

SEQ ID NO: 51701 - DNA, 30 bp, synthetic construct; identical to SEQ ID NO: 1643
  misc_feature 1..30: note = Probe
  source 1..30: mol_type = other DNA

SEQ ID NO: 51702 - DNA, 31 bp, synthetic construct; identical to SEQ ID NO: 1644
  misc_feature 1..31: note = Probe
  source 1..31: mol_type = other DNA

SEQ ID NO: 51703 - DNA, 33 bp, synthetic construct; identical to SEQ ID NO: 1646
  misc_feature 1..33: note = Probe
  source 1..33: mol_type = other DNA

SEQ ID NO: 51704 - DNA, 34 bp, synthetic construct; identical to SEQ ID NO: 1647
  misc_feature 1..34: note = Probe
  source 1..34: mol_type = other DNA

SEQ ID NO: 51705 - DNA, 35 bp, synthetic construct; identical to SEQ ID NO: 1648
  misc_feature 1..35: note = Probe
  source 1..35: mol_type = other DNA

SEQ ID NO: 51706 - DNA, 40 bp, synthetic construct; identical to SEQ ID NO: 1651
  misc_feature 1..40: note = Probe
  source 1..40: mol_type = other DNA

SEQ ID NO: 51707 - DNA, 41 bp, synthetic construct; identical to SEQ ID NO: 7796
  misc_feature 1..41: note = Probe
  source 1..41: mol_type = other DNA

SEQ ID NO: 51708 - DNA, 25 bp, synthetic construct
  misc_feature 1..25: note = Probe
  source 1..25: mol_type = other DNA
tcccatatggtctagcggttaggat

SEQ ID NO: 51709 - DNA, 26 bp, synthetic construct
  misc_feature 1..26: note = Probe
  source 1..26: mol_type = other DNA
tcccatatggtctagcggttaggatt

SEQ ID NO: 51710 - DNA, 27 bp, synthetic construct
  misc_feature 1..27: note = Probe
  source 1..27: mol_type = other DNA
tcccatatggtctagcggttaggattc

SEQ ID NO: 51711 - DNA, 28 bp, synthetic construct
  misc_feature 1..28: note = Probe
  source 1..28: mol_type = other DNA
tcccatatggtctagcggttaggattcc

SEQ ID NO: 51712 - DNA, 29 bp, synthetic construct
  misc_feature 1..29: note = Probe
  source 1..29: mol_type = other DNA
tcccatatggtctagcggttaggattcct

SEQ ID NO: 51713 - DNA, 33 bp, synthetic construct; identical to SEQ ID NO: 1662
  misc_feature 1..33: note = Probe
  source 1..33: mol_type = other DNA

SEQ ID NO: 51714 - DNA, 17 bp, synthetic construct
  misc_feature 1..17: note = Probe
  source 1..17: mol_type = other DNA
tccccggcacctccacc

SEQ ID NO: 51715 - DNA, 18 bp, synthetic construct
  misc_feature 1..18: note = Probe
  source 1..18: mol_type = other DNA
tccccggcacctccacca

SEQ ID NO: 51716 - DNA, 31 bp, synthetic construct; identical to SEQ ID NO: 1679
  misc_feature 1..31: note = Probe
  source 1..31: mol_type = other DNA

SEQ ID NO: 51717 - DNA, 32 bp, synthetic construct; identical to SEQ ID NO: 1680
  misc_feature 1..32: note = Probe
  source 1..32: mol_type = other DNA

SEQ ID NO: 51718 - DNA, 33 bp, synthetic construct; identical to SEQ ID NO: 1681
  misc_feature 1..33: note = Probe
  source 1..33: mol_type = other DNA

SEQ ID NO: 51719 - DNA, 34 bp, synthetic construct; identical to SEQ ID NO: 1682
  misc_feature 1..34: note = Probe
  source 1..34: mol_type = other DNA

SEQ ID NO: 51720 - DNA, 35 bp, synthetic construct; identical to SEQ ID NO: 1683
  misc_feature 1..35: note = Probe
  source 1..35: mol_type = other DNA

SEQ ID NO: 51721 - DNA, 36 bp, synthetic construct; identical to SEQ ID NO: 1684
  misc_feature 1..36: note = Probe
  source 1..36: mol_type = other DNA

SEQ ID NO: 51722 - DNA, 37 bp, synthetic construct; identical to SEQ ID NO: 1685
  misc_feature 1..37: note = Probe
  source 1..37: mol_type = other DNA

SEQ ID NO: 51723 - DNA, 38 bp, synthetic construct; identical to SEQ ID NO: 1686
  misc_feature 1..38: note = Probe
  source 1..38: mol_type = other DNA

SEQ ID NO: 51724 - DNA, 39 bp, synthetic construct; identical to SEQ ID NO: 1687
  misc_feature 1..39: note = Probe
  source 1..39: mol_type = other DNA

SEQ ID NO: 51725 - DNA, 42 bp, synthetic construct; identical to SEQ ID NO: 1689
  misc_feature 1..42: note = Probe
  source 1..42: mol_type = other DNA

SEQ ID NO: 51726 - DNA, 50 bp, synthetic construct; identical to SEQ ID NO: 1691
  misc_feature 1..50: note = Probe
  source 1..50: mol_type = other DNA

SEQ ID NO: 51727 - DNA, 22 bp, synthetic construct
  misc_feature 1..22: note = Probe
  source 1..22: mol_type = other DNA
tcctaagccagggattgtgggt

SEQ ID NO: 51728 - DNA, 22 bp, synthetic construct
  misc_feature 1..22: note = Probe
  source 1..22: mol_type = other DNA
tcctcgttagtatagtggtgag

SEQ ID NO: 51729 - DNA, 23 bp, synthetic construct
  misc_feature 1..23: note = Probe
  source 1..23: mol_type = other DNA
tcctcgttagtatagtggtgagt

SEQ ID NO: 51730 - DNA, 24 bp, synthetic construct
  misc_feature 1..24: note = Probe
  source 1..24: mol_type = other DNA
tcctcgttagtatagtggtgagta

SEQ ID NO: 51731 - DNA, 25 bp, synthetic construct
  misc_feature 1..25: note = Probe
  source 1..25: mol_type = other DNA
tcctcgttagtatagtggtgagtat

SEQ ID NO: 51732 - DNA, 26 bp, synthetic construct
  misc_feature 1..26: note = Probe
  source 1..26: mol_type = other DNA
tcctcgttagtatagtggtgagtatc

SEQ ID NO: 51733 - DNA, 27 bp, synthetic construct
  misc_feature 1..27: note = Probe
  source 1..27: mol_type = other DNA
tcctcgttagtatagtggtgagtatcc

SEQ ID NO: 51734 - DNA, 28 bp, synthetic construct
  misc_feature 1..28: note = Probe
  source 1..28: mol_type = other DNA
tcctcgttagtatagtggtgagtatccc

SEQ ID NO: 51735 - DNA, 29 bp, synthetic construct
  misc_feature 1..29: note = Probe
  source 1..29: mol_type = other DNA
tcctcgttagtatagtggtgagtatcccc

SEQ ID NO: 51736 - DNA, 30 bp, synthetic construct; identical to SEQ ID NO: 1701
  misc_feature 1..30: note = Probe
  source 1..30: mol_type = other DNA

SEQ ID NO: 51737 - DNA, 31 bp, synthetic construct; identical to SEQ ID NO: 1702
  misc_feature 1..31: note = Probe
  source 1..31: mol_type = other DNA

SEQ ID NO: 51738 - DNA, 32 bp, synthetic construct; identical to SEQ ID NO: 1703
  misc_feature 1..32: note = Probe
  source 1..32: mol_type = other DNA

SEQ ID NO: 51739 - DNA, 33 bp, synthetic construct; identical to SEQ ID NO: 1704
  misc_feature 1..33: note = Probe
  source 1..33: mol_type = other DNA

SEQ ID NO: 51740 - DNA, 34 bp, synthetic construct; identical to SEQ ID NO: 1705
  misc_feature 1..34: note = Probe
  source 1..34: mol_type = other DNA

SEQ ID NO: 51741 - DNA, 35 bp, synthetic construct; identical to SEQ ID NO: 1706
  misc_feature 1..35: note = Probe
  source 1..35: mol_type = other DNA

SEQ ID NO: 51742 - DNA, 36 bp, synthetic construct; identical to SEQ ID NO: 1707
  misc_feature 1..36: note = Probe
  source 1..36: mol_type = other DNA

SEQ ID NO: 51743 - DNA, 50 bp, synthetic construct; identical to SEQ ID NO: 1711
  misc_feature 1..50: note = Probe
  source 1..50: mol_type = other DNA

SEQ ID NO: 51744 - DNA, 18 bp, synthetic construct
  misc_feature 1..18: note = Probe
  source 1..18: mol_type = other DNA
tcgggtgcgagaggtccc

SEQ ID NO: 51745 - DNA, 22 bp, synthetic construct
  misc_feature 1..22: note = Probe
  source 1..22: mol_type = other DNA
tcgggtgcgagaggtcccgggt

SEQ ID NO: 51746 - DNA, 23 bp, synthetic construct
  misc_feature 1..23: note = Probe
  source 1..23: mol_type = other DNA
tcgggtgcgagaggtcccgggtt

SEQ ID NO: 51747 - DNA, 16 bp, synthetic construct
  misc_feature 1..16: note = Probe
  source 1..16: mol_type = other DNA
tcggtagagcatcaga

SEQ ID NO: 51748 - DNA, 16 bp, synthetic construct
  misc_feature 1..16: note = Probe
  source 1..16: mol_type = other DNA
tcggtagagcatggga

SEQ ID NO: 51749 - DNA, 17 bp, synthetic construct
  misc_feature 1..17: note = Probe
  source 1..17: mol_type = other DNA
tcggtagagcatgggac

SEQ ID NO: 51750 - DNA, 22 bp, synthetic construct
  misc_feature 1..22: note = Probe
  source 1..22: mol_type = other DNA
tcgtaaaccgaagatcacgggt

SEQ ID NO: 51751 - DNA, 22 bp, synthetic construct
  misc_feature 1..22: note = Probe
  source 1..22: mol_type = other DNA
tcgtaaaccgaagatcgcgggt

SEQ ID NO: 51752 - DNA, 39 bp, synthetic construct; identical to SEQ ID NO: 24131
  misc_feature 1..39: note = Probe
  source 1..39: mol_type = other DNA

SEQ ID NO: 51753 - DNA, 24 bp, synthetic construct
  misc_feature 1..24: note = Probe
  source 1..24: mol_type = other DNA
tctcataatctgaaggtcgtgagt

SEQ ID NO: 51754 - DNA, 20 bp, synthetic construct
  misc_feature 1..20: note = Probe
  source 1..20: mol_type = other DNA
tgaatccagcgatccgagtt

SEQ ID NO: 51755 - DNA, 32 bp, synthetic construct; identical to SEQ ID NO: 1736
  misc_feature 1..32: note = Probe
  source 1..32: mol_type = other DNA

SEQ ID NO: 51756 - DNA, 36 bp, synthetic construct; identical to SEQ ID NO: 1740
  misc_feature 1..36: note = Probe
  source 1..36: mol_type = other DNA

SEQ ID NO: 51757 - DNA, 38 bp, synthetic construct; identical to SEQ ID NO: 1742
  misc_feature 1..38: note = Probe
  source 1..38: mol_type = other DNA

SEQ ID NO: 51758 - DNA, 32 bp, synthetic construct
  misc_feature 1..32: note = Probe
  source 1..32: mol_type = other DNA
tgagcatagctgccttccaagcagttgacccg

SEQ ID NO: 51759 - DNA, 21 bp, synthetic construct
  misc_feature 1..21: note = Probe
  source 1..21: mol_type = other DNA
tgccacgcgggaggcccgggt

SEQ ID NO: 51760 - DNA, 22 bp, synthetic construct
  misc_feature 1..22: note = Probe
  source 1..22: mol_type = other DNA
tgccacgcgggaggcccgggtt

SEQ ID NO: 51761 - DNA, 23 bp, synthetic construct
  misc_feature 1..23: note = Probe
  source 1..23: mol_type = other DNA
tggtagaattctcgcctgccacg

SEQ ID NO: 51762 - DNA, 24 bp, synthetic construct
  misc_feature 1..24: note = Probe
  source 1..24: mol_type = other DNA
tggtagaattctcgcctgccacgc

SEQ ID NO: 51763 - DNA, 33 bp, synthetic construct; identical to SEQ ID NO: 1768
  misc_feature 1..33: note = Probe
  source 1..33: mol_type = other DNA

SEQ ID NO: 51764 - DNA, 33 bp, synthetic construct; identical to SEQ ID NO: 24393
  misc_feature 1..33: note = Probe
  source 1..33: mol_type = other DNA

SEQ ID NO: 51765 - DNA, 24 bp, synthetic construct
  misc_feature 1..24: note = Probe
  source 1..24: mol_type = other DNA
tggtctagcggttaggattcctgg

SEQ ID NO: 51766 - DNA, 42 bp, synthetic construct; identical to SEQ ID NO: 24412
  misc_feature 1..42: note = Probe
  source 1..42: mol_type = other DNA

SEQ ID NO: 51767 - DNA, 21 bp, synthetic construct
  misc_feature 1..21: note = Probe
  source 1..21: mol_type = other DNA
tggtgagtatccccgcctgtc

SEQ ID NO: 51768 - DNA, 23 bp, synthetic construct
  misc_feature 1..23: note = Probe
  source 1..23: mol_type = other DNA
tggtgagtatccccgcctgtcac

SEQ ID NO: 51769 - DNA, 24 bp, synthetic construct
  misc_feature 1..24: note = Probe
  source 1..24: mol_type = other DNA
tggtgagtatccccgcctgtcacg

SEQ ID NO: 51770 - DNA, 35 bp, synthetic construct; identical to SEQ ID NO: 14415
  misc_feature 1..35: note = Probe
  source 1..35: mol_type = other DNA

SEQ ID NO: 51771 - DNA, 23 bp, synthetic construct
  misc_feature 1..23: note = Probe
  source 1..23: mol_type = other DNA
tggtgtagtggtatcatgcaaga

SEQ ID NO: 51772 - DNA, 41 bp, synthetic construct; identical to SEQ ID NO: 14425
  misc_feature 1..41: note = Probe
  source 1..41: mol_type = other DNA

SEQ ID NO: 51773 - DNA, 16 bp, synthetic construct
  misc_feature 1..16: note = Probe
  source 1..16: mol_type = other DNA
tggttaggattcggcg

SEQ ID NO: 51774 - DNA, 17 bp, synthetic construct
  misc_feature 1..17: note = Probe
  source 1..17: mol_type = other DNA
tggttaggattcggcgc

SEQ ID NO: 51775 - DNA, 18 bp, synthetic construct
  misc_feature 1..18: note = Probe
  source 1..18: mol_type = other DNA
tggttaggattcggcgct

SEQ ID NO: 51776 - DNA, 19 bp, synthetic construct
  misc_feature 1..19: note = Probe
  source 1..19: mol_type = other DNA
tggttaggattcggcgctc

SEQ ID NO: 51777 - DNA, 20 bp, synthetic construct
  misc_feature 1..20: note = Probe
  source 1..20: mol_type = other DNA
tggttaggattcggcgctct

SEQ ID NO: 51778 - DNA, 22 bp, synthetic construct
  misc_feature 1..22: note = Probe
  source 1..22: mol_type = other DNA
tggttaggattcggcgctctca

SEQ ID NO: 51779 - DNA, 23 bp, synthetic construct
  misc_feature 1..23: note = Probe
  source 1..23: mol_type = other DNA
tggttaggattcggcgctctcac

SEQ ID NO: 51780 - DNA, 24 bp, synthetic construct
  misc_feature 1..24: note = Probe
  source 1..24: mol_type = other DNA
tggttaggattcggcgctctcacc

SEQ ID NO: 51781 - DNA, 27 bp, synthetic construct
  misc_feature 1..27: note = Probe
  source 1..27: mol_type = other DNA
tggttaggattcggcgctctcaccgcc

SEQ ID NO: 51782 - DNA, 29 bp, synthetic construct
  misc_feature 1..29: note = Probe
  source 1..29: mol_type = other DNA
tggttaggattcggcgctctcaccgccgc

SEQ ID NO: 51783 - DNA, 33 bp, synthetic construct; identical to SEQ ID NO: 24446
  misc_feature 1..33: note = Probe
  source 1..33: mol_type = other DNA

SEQ ID NO: 51784 - DNA, 34 bp, synthetic construct; identical to SEQ ID NO: 14437
  misc_feature 1..34: note = Probe
  source 1..34: mol_type = other DNA

SEQ ID NO: 51785 - DNA, 35 bp, synthetic construct; identical to SEQ ID NO: 24447
  misc_feature 1..35: note = Probe
  source 1..35: mol_type = other DNA

SEQ ID NO: 51786 - DNA, 17 bp, synthetic construct
  misc_feature 1..17: note = Probe
  source 1..17: mol_type = other DNA
tggttagtactctgcgt

SEQ ID NO: 51787 - DNA, 16 bp, synthetic construct
  misc_feature 1..16: note = Probe
  source 1..16: mol_type = other DNA
tggttagtatccccgc

SEQ ID NO: 51788 - DNA, 21 bp, synthetic construct
  misc_feature 1..21: note = Probe
  source 1..21: mol_type = other DNA
tgtcacgcgggagaccggggt

SEQ ID NO: 51789 - DNA, 37 bp, synthetic construct; identical to SEQ ID NO: 1786
  misc_feature 1..37: note = Probe
  source 1..37: mol_type = other DNA

SEQ ID NO: 51790 - DNA, 16 bp, synthetic construct
  misc_feature 1..16: note = Probe
  source 1..16: mol_type = other DNA
ttcccattcttgcgac

SEQ ID NO: 51791 - DNA, 17 bp, synthetic construct
  misc_feature 1..17: note = Probe
  source 1..17: mol_type = other DNA
ttcccattcttgcgacc

SEQ ID NO: 51792 - DNA, 18 bp, synthetic construct
  misc_feature 1..18: note = Probe
  source 1..18: mol_type = other DNA
ttcccattcttgcgaccc

SEQ ID NO: 51793 - DNA, 23 bp, synthetic construct
  misc_feature 1..23: note = Probe
  source 1..23: mol_type = other DNA
ttccccgcacaggttcgaatcct

SEQ ID NO: 51794 - DNA, 50 bp, synthetic construct; identical to SEQ ID NO: 4
  misc_feature 1..50: note = Probe
  source 1..50: mol_type = other DNA

SEQ ID NO: 51795 - DNA, 23 bp, synthetic construct
  misc_feature 1..23: note = Probe
  source 1..23: mol_type = other DNA
aaaacctttttccaaggacaaat

SEQ ID NO: 51796 - DNA, 32 bp, synthetic construct; identical to SEQ ID NO: 14485
  misc_feature 1..32: note = Probe
  source 1..32: mol_type = other DNA

SEQ ID NO: 51797 - DNA, 50 bp, synthetic construct; identical to SEQ ID NO: 1818
  misc_feature 1..50: note = Probe
  source 1..50: mol_type = other DNA

SEQ ID NO: 51798 - DNA, 39 bp, synthetic construct; identical to SEQ ID NO: 6
  misc_feature 1..39: note = Probe
  source 1..39: mol_type = other DNA

SEQ ID NO: 51799 - DNA, 40 bp, synthetic construct; identical to SEQ ID NO: 7
  misc_feature 1..40: note = Probe
  source 1..40: mol_type = other DNA

SEQ ID NO: 51800 - DNA, 41 bp, synthetic construct; identical to SEQ ID NO: 1823
  misc_feature 1..41: note = Probe
  source 1..41: mol_type = other DNA

SEQ ID NO: 51801 - DNA, 42 bp, synthetic construct; identical to SEQ ID NO: 1824
  misc_feature 1..42: note = Probe
  source 1..42: mol_type = other DNA

SEQ ID NO: 51802 - DNA, 43 bp, synthetic construct; identical to SEQ ID NO: 1825
  misc_feature 1..43: note = Probe
  source 1..43: mol_type = other DNA

SEQ ID NO: 51803 - DNA, 44 bp, synthetic construct; identical to SEQ ID NO: 1826
  misc_feature 1..44: note = Probe
  source 1..44: mol_type = other DNA

SEQ ID NO: 51804 - DNA, 45 bp, synthetic construct; identical to SEQ ID NO: 1827
  misc_feature 1..45: note = Probe
  source 1..45: mol_type = other DNA

SEQ ID NO: 51805 - DNA, 46 bp, synthetic construct; identical to SEQ ID NO: 1828
  misc_feature 1..46: note = Probe
  source 1..46: mol_type = other DNA

SEQ ID NO: 51806 - DNA, 50 bp, synthetic construct; identical to SEQ ID NO: 1830
  misc_feature 1..50: note = Probe
  source 1..50: mol_type = other DNA

SEQ ID NO: 51807 - DNA, 38 bp, synthetic construct; identical to SEQ ID NO: 1833
  misc_feature 1..38: note = Probe
  source 1..38: mol_type = other DNA

SEQ ID NO: 51808 - DNA, 46 bp, synthetic construct
  misc_feature 1..46: note = Probe
  source 1..46: mol_type = other DNA
aaaagagttactttgatagagtaaataataggagcttaaaccccct

SEQ ID NO: 51809 - DNA, 50 bp, synthetic construct; identical to SEQ ID NO: 1838
  misc_feature 1..50: note = Probe
  source 1..50: mol_type = other DNA

SEQ ID NO: 51810 - DNA, 24 bp, synthetic construct
  misc_feature 1..24: note = Probe
  source 1..24: mol_type = other DNA
aaaattttggtgcaactccaaata

SEQ ID NO: 51811 - DNA, 50 bp, synthetic construct; identical to SEQ ID NO: 1846
  misc_feature 1..50: note = Probe
  source 1..50: mol_type = other DNA

SEQ ID NO: 51812 - DNA, 50 bp, synthetic construct; identical to SEQ ID NO: 14
  misc_feature 1..50: note = Probe
  source 1..50: mol_type = other DNA

SEQ ID NO: 51813 - DNA, 25 bp, synthetic construct
  misc_feature 1..25: note = Probe
  source 1..25: mol_type = other DNA
aaaccatttcataactttgtcaaag

SEQ ID NO: 51814 - DNA, 26 bp, synthetic construct
  misc_feature 1..26: note = Probe
  source 1..26: mol_type = other DNA
aaaccatttcataactttgtcaaagt

SEQ ID NO: 51815 - DNA, 50 bp, synthetic construct; identical to SEQ ID NO: 1871
  misc_feature 1..50: note = Probe
  source 1..50: mol_type = other DNA

SEQ ID NO: 51816 - DNA, 15 bp, synthetic construct
  misc_feature 1..15: note = Probe
  source 1..15: mol_type = other DNA
aaacccactccacct

SEQ ID NO: 51817 - DNA, 35 bp, synthetic construct; identical to SEQ ID NO: 1876
  misc_feature 1..35: note = Probe
  source 1..35: mol_type = other DNA

SEQ ID NO: 51818 - DNA, 19 bp, synthetic construct
  misc_feature 1..19: note = Probe
  source 1..19: mol_type = other DNA
aaaccgggcggaaacacct

SEQ ID NO: 51819 - DNA, 20 bp, synthetic construct
  misc_feature 1..20: note = Probe
  source 1..20: mol_type = other DNA
aaaccgggcggaaacacctc

SEQ ID NO: 51820 - DNA, 21 bp, synthetic construct
  misc_feature 1..21: note = Probe
  source 1..21: mol_type = other DNA
aaaccgggcggaaacacctcc

SEQ ID NO: 51821 - DNA, 20 bp, synthetic construct
  misc_feature 1..20: note = Probe
  source 1..20: mol_type = other DNA
aaaccgggcggaaacacgtt

SEQ ID NO: 51822 - DNA, 21 bp, synthetic construct
  misc_feature 1..21: note = Probe
  source 1..21: mol_type = other DNA
aaaccgggcggaaacacgttt

SEQ ID NO: 51823 - DNA, 19 bp, synthetic construct
  misc_feature 1..19: note = Probe
  source 1..19: mol_type = other DNA
aaaccgggcggaaacaggt

SEQ ID NO: 51824 - DNA, 20 bp, synthetic construct
  misc_feature 1..20: note = Probe
  source 1..20: mol_type = other DNA
aaaccgggcggaaacaggta

SEQ ID NO: 51825 - DNA, 21 bp, synthetic construct
  misc_feature 1..21: note = Probe
  source 1..21: mol_type = other DNA
aaaccgggcggaaacaggtag

SEQ ID NO: 51826 - DNA, 22 bp, synthetic construct
  misc_feature 1..22: note = Probe
  source 1..22: mol_type = other DNA
aaaccgggcggaaacaggtagg

SEQ ID NO: 51827 - DNA, 27 bp, synthetic construct
  misc_feature 1..27: note = Probe
  source 1..27: mol_type = other DNA
aaacctagccccaaacccactccacct

SEQ ID NO: 51828 - DNA, 49 bp, synthetic construct; identical to SEQ ID NO: 1884
  misc_feature 1..49: note = Probe
  source 1..49: mol_type = other DNA

SEQ ID NO: 51829 - DNA, 50 bp, synthetic construct; identical to SEQ ID NO: 1885
  misc_feature 1..50: note = Probe
  source 1..50: mol_type = other DNA

SEQ ID NO: 51830 - DNA, 39 bp, synthetic construct; identical to SEQ ID NO: 16
  misc_feature 1..39: note = Probe
  source 1..39: mol_type = other DNA

SEQ ID NO: 51831 - DNA, 40 bp, synthetic construct; identical to SEQ ID NO: 1886
  misc_feature 1..40: note = Probe
  source 1..40: mol_type = other DNA

SEQ ID NO: 51832 - DNA, 41 bp, synthetic construct; identical to SEQ ID NO: 1887
  misc_feature 1..41: note = Probe
  source 1..41: mol_type = other DNA

SEQ ID NO: 51833 - DNA, 44 bp, synthetic construct; identical to SEQ ID NO: 1888
  misc_feature 1..44: note = Probe
  source 1..44: mol_type = other DNA

SEQ ID NO: 51834 - DNA, 50 bp, synthetic construct; identical to SEQ ID NO: 1890
  misc_feature 1..50: note = Probe
  source 1..50: mol_type = other DNA

SEQ ID NO: 51835 - DNA, 38 bp, synthetic construct; identical to SEQ ID NO: 1895
  misc_feature 1..38: note = Probe
  source 1..38: mol_type = other DNA

SEQ ID NO: 51836 - DNA, 39 bp, synthetic construct; identical to SEQ ID NO: 1896
  misc_feature 1..39: note = Probe
  source 1..39: mol_type = other DNA

SEQ ID NO: 51837 - DNA, 40 bp, synthetic construct; identical to SEQ ID NO: 1897
  misc_feature 1..40: note = Probe
  source 1..40: mol_type = other DNA

SEQ ID NO: 51838 - DNA, 41 bp, synthetic construct; identical to SEQ ID NO: 1898
  misc_feature 1..41: note = Probe
  source 1..41: mol_type = other DNA

SEQ ID NO: 51839 - DNA, 16 bp, synthetic construct
  misc_feature 1..16: note = Probe
  source 1..16: mol_type = other DNA
aaagacaccccccaca

SEQ ID NO: 51840 - DNA, 17 bp, synthetic construct
  misc_feature 1..17: note = Probe
  source 1..17: mol_type = other DNA
aaagacaccccccacag

SEQ ID NO: 51841 - DNA, 19 bp, synthetic construct
  misc_feature 1..19: note = Probe
  source 1..19: mol_type = other DNA
aaagacaccccccacagtt

SEQ ID NO: 51842 - DNA, 28 bp, synthetic construct
  misc_feature 1..28: note = Probe
  source 1..28: mol_type = other DNA
aaagacaccccccacagtttatgtagct

SEQ ID NO: 51843 - DNA, 36 bp, synthetic construct; identical to SEQ ID NO: 1911
  misc_feature 1..36: note = Probe
  source 1..36: mol_type = other DNA

SEQ ID NO: 51844 - DNA, 38 bp, synthetic construct; identical to SEQ ID NO: 1913
  misc_feature 1..38: note = Probe
  source 1..38: mol_type = other DNA

SEQ ID NO: 51845 - DNA, 24 bp, synthetic construct
  misc_feature 1..24: note = Probe
  source 1..24: mol_type = other DNA
aaagacaggggttaggcctctttt

SEQ ID NO: 51846 - DNA, 32 bp, synthetic construct; identical to SEQ ID NO: 1925
  misc_feature 1..32: note = Probe
  source 1..32: mol_type = other DNA

SEQ ID NO: 51847 - DNA, 50 bp, synthetic construct; identical to SEQ ID NO: 14605
  misc_feature 1..50: note = Probe
  source 1..50: mol_type = other DNA

SEQ ID NO: 51848 - DNA, 33 bp, synthetic construct; identical to SEQ ID NO: 1926
  misc_feature 1..33: note = Probe
  source 1..33: mol_type = other DNA

SEQ ID NO: 51849 - DNA, 34 bp, synthetic construct; identical to SEQ ID NO: 1927
  misc_feature 1..34: note = Probe
  source 1..34: mol_type = other DNA

SEQ ID NO: 51850 - DNA, 37 bp, synthetic construct; identical to SEQ ID NO: 1930
  misc_feature 1..37: note = Probe
  source 1..37: mol_type = other DNA

SEQ ID NO: 51851 - DNA, 36 bp, synthetic construct; identical to SEQ ID NO: 21
  misc_feature 1..36: note = Probe
  source 1..36: mol_type = other DNA

SEQ ID NO: 51852 - DNA, 44 bp, synthetic construct; identical to SEQ ID NO: 22
  misc_feature 1..44: note = Probe
  source 1..44: mol_type = other DNA

SEQ ID NO: 51853 - DNA, 50 bp, synthetic construct; identical to SEQ ID NO: 25
  misc_feature 1..50: note = Probe
  source 1..50: mol_type = other DNA

SEQ ID NO: 51854 - DNA, 50 bp, synthetic construct; identical to SEQ ID NO: 1962
  misc_feature 1..50: note = Probe
  source 1..50: mol_type = other DNA

SEQ ID NO: 51855 - DNA, 27 bp, synthetic construct
  misc_feature 1..27: note = Probe
  source 1..27: mol_type = other DNA
aaagctcacaagaactgctaactcatg

SEQ ID NO: 51856 - DNA, 50 bp, synthetic construct; identical to SEQ ID NO: 32
  misc_feature 1..50: note = Probe
  source 1..50: mol_type = other DNA

SEQ ID NO: 51857 - DNA, 22 bp, synthetic construct
  misc_feature 1..22: note = Probe
  source 1..22: mol_type = other DNA
aaataagctatcgggcccatac

SEQ ID NO: 51858 - DNA, 24 bp, synthetic construct
  misc_feature 1..24: note = Probe
  source 1..24: mol_type = other DNA
aaataagctatcgggcccataccc

SEQ ID NO: 51859 - DNA, 25 bp, synthetic construct
  misc_feature 1..25: note = Probe
  source 1..25: mol_type = other DNA
aaataagctatcgggcccatacccc

SEQ ID NO: 51860 - DNA, 29 bp, synthetic construct
  misc_feature 1..29: note = Probe
  source 1..29: mol_type = other DNA
aaataagctatcgggcccataccccgaaa

SEQ ID NO: 51861 - DNA, 30 bp, synthetic construct; identical to SEQ ID NO: 1982
  misc_feature 1..30: note = Probe
  source 1..30: mol_type = other DNA

SEQ ID NO: 51862 - DNA, 31 bp, synthetic construct; identical to SEQ ID NO: 1983
  misc_feature 1..31: note = Probe
  source 1..31: mol_type = other DNA

SEQ ID NO: 51863 - DNA, 32 bp, synthetic construct; identical to SEQ ID NO: 1984
  misc_feature 1..32: note = Probe
  source 1..32: mol_type = other DNA

SEQ ID NO: 51864 - DNA, 33 bp, synthetic construct; identical to SEQ ID NO: 1985
  misc_feature 1..33: note = Probe
  source 1..33: mol_type = other DNA

SEQ ID NO: 51865 - DNA, 38 bp, synthetic construct; identical to SEQ ID NO: 14670
  misc_feature 1..38: note = Probe
  source 1..38: mol_type = other DNA

SEQ ID NO: 51866 - DNA, 39 bp, synthetic construct; identical to SEQ ID NO: 1987
  misc_feature 1..39: note = Probe
  source 1..39: mol_type = other DNA

SEQ ID NO: 51867 - DNA, 50 bp, synthetic construct; identical to SEQ ID NO: 1989
  misc_feature 1..50: note = Probe
  source 1..50: mol_type = other DNA

SEQ ID NO: 51868 - DNA, 50 bp, synthetic construct
  misc_feature 1..50: note = Probe
  source 1..50: mol_type = other DNA
aaatatgtctgataaaagagttactttgatagagtaaataataggagctt

SEQ ID NO: 51869 - DNA, 22 bp, synthetic construct
  misc_feature 1..22: note = Probe
  source 1..22: mol_type = other DNA
aaatcccggacgagcccacttc

SEQ ID NO: 51870 - DNA, 23 bp, synthetic construct
  misc_feature 1..23: note = Probe
  source 1..23: mol_type = other DNA
aaatcccggacgagcccacttca

SEQ ID NO: 51871 - DNA, 39 bp, synthetic construct; identical to SEQ ID NO: 2009
  misc_feature 1..39: note = Probe
  source 1..39: mol_type = other DNA

SEQ ID NO: 51872 - DNA, 49 bp, synthetic construct; identical to SEQ ID NO: 2012
  misc_feature 1..49: note = Probe
  source 1..49: mol_type = other DNA

SEQ ID NO: 51873 - DNA, 50 bp, synthetic construct; identical to SEQ ID NO: 2013
  misc_feature 1..50: note = Probe
  source 1..50: mol_type = other DNA

SEQ ID NO: 51874 - DNA, 25 bp, synthetic construct
  misc_feature 1..25: note = Probe
  source 1..25: mol_type = other DNA
aacacaaagcacccaacttacactt

SEQ ID NO: 51875 - DNA, 29 bp, synthetic construct
  misc_feature 1..29: note = Probe
  source 1..29: mol_type = other DNA
aacacaaagcacccaacttacacttagga

SEQ ID NO: 51876 - DNA, 21 bp, synthetic construct
  misc_feature 1..21: note = Probe
  source 1..21: mol_type = other DNA
aacacctctttacagtgaaat

SEQ ID NO: 51877 - DNA, 31 bp, synthetic construct; identical to SEQ ID NO: 2039
  misc_feature 1..31: note = Probe
  source 1..31: mol_type = other DNA

SEQ ID NO: 51878 - DNA, 50 bp, synthetic construct; identical to SEQ ID NO: 42
  misc_feature 1..50: note = Probe
  source 1..50: mol_type = other DNA

SEQ ID NO: 51879 - DNA, 29 bp, synthetic construct
  misc_feature 1..29: note = Probe
  source 1..29: mol_type = other DNA
aaccaaaacatcagattgtgaatctgaca

SEQ ID NO: 51880 - DNA, 30 bp, synthetic construct; identical to SEQ ID NO: 2063
  misc_feature 1..30: note = Probe
  source 1..30: mol_type = other DNA

SEQ ID NO: 51881 - DNA, 31 bp, synthetic construct; identical to SEQ ID NO: 2064
  misc_feature 1..31: note = Probe
  source 1..31: mol_type = other DNA

SEQ ID NO: 51882 - DNA, 32 bp, synthetic construct; identical to SEQ ID NO: 2065
  misc_feature 1..32: note = Probe
  source 1..32: mol_type = other DNA

SEQ ID NO: 51883 - DNA, 33 bp, synthetic construct; identical to SEQ ID NO: 2066
  misc_feature 1..33: note = Probe
  source 1..33: mol_type = other DNA

SEQ ID NO: 51884 - DNA, 34 bp, synthetic construct; identical to SEQ ID NO: 14767
  misc_feature 1..34: note = Probe
  source 1..34: mol_type = other DNA

SEQ ID NO: 51885 - DNA, 35 bp, synthetic construct; identical to SEQ ID NO: 14768
  misc_feature 1..35: note = Probe
  source 1..35: mol_type = other DNA

SEQ ID NO: 51886 - DNA, 36 bp, synthetic construct; identical to SEQ ID NO: 2067
  misc_feature 1..36: note = Probe
  source 1..36: mol_type = other DNA

SEQ ID NO: 51887 - DNA, 37 bp, synthetic construct; identical to SEQ ID NO: 2068
  misc_feature 1..37: note = Probe
  source 1..37: mol_type = other DNA

SEQ ID NO: 51888 - DNA, 38 bp, synthetic construct; identical to SEQ ID NO: 2069
  misc_feature 1..38: note = Probe
  source 1..38: mol_type = other DNA

SEQ ID NO: 51889 - DNA, 39 bp, synthetic construct; identical to SEQ ID NO: 2070
  misc_feature 1..39: note = Probe
  source 1..39: mol_type = other DNA

SEQ ID NO: 51890 - DNA, 25 bp, synthetic construct
  misc_feature 1..25: note = Probe
  source 1..25: mol_type = other DNA
aaccaacacctctttacagtgaaat

SEQ ID NO: 51891 - DNA, 39 bp, synthetic construct; identical to SEQ ID NO: 2079
  misc_feature 1..39: note = Probe
  source 1..39: mol_type = other DNA

SEQ ID NO: 51892 - DNA, 21 bp, synthetic construct
  misc_feature 1..21: note = Probe
  source 1..21: mol_type = other DNA
aaccgagcgtccaagctcttt

SEQ ID NO: 51893 - DNA, 22 bp, synthetic construct
  misc_feature 1..22: note = Probe
  source 1..22: mol_type = other DNA
aaccgagcgtccaagctctttc

SEQ ID NO: 51894 - DNA, 23 bp, synthetic construct
  misc_feature 1..23: note = Probe
  source 1..23: mol_type = other DNA
aaccgagcgtccaagctctttcc

SEQ ID NO: 51895 - DNA, 24 bp, synthetic construct
  misc_feature 1..24: note = Probe
  source 1..24: mol_type = other DNA
aaccgagcgtccaagctctttcca

SEQ ID NO: 51896 - DNA, 25 bp, synthetic construct
  misc_feature 1..25: note = Probe
  source 1..25: mol_type = other DNA
aaccgagcgtccaagctctttccat

SEQ ID NO: 51897 - DNA, 26 bp, synthetic construct
  misc_feature 1..26: note = Probe
  source 1..26: mol_type = other DNA
aaccgagcgtccaagctctttccatt

SEQ ID NO: 51898 - DNA, 27 bp, synthetic construct
  misc_feature 1..27: note = Probe
  source 1..27: mol_type = other DNA
aaccgagcgtccaagctctttccattt

SEQ ID NO: 51899 - DNA, 29 bp, synthetic construct
  misc_feature 1..29: note = Probe
  source 1..29: mol_type = other DNA
aaccggagatgaaaacctttttccaagga

SEQ ID NO: 51900 - DNA, 31 bp, synthetic construct; identical to SEQ ID NO: 53
  misc_feature 1..31: note = Probe
  source 1..31: mol_type = other DNA

SEQ ID NO: 51901 - DNA, 32 bp, synthetic construct; identical to SEQ ID NO: 2102
  misc_feature 1..32: note = Probe
  source 1..32: mol_type = other DNA

SEQ ID NO: 51902 - DNA, 33 bp, synthetic construct; identical to SEQ ID NO: 2103
  misc_feature 1..33: note = Probe
  source 1..33: mol_type = other DNA

SEQ ID NO: 51903 - DNA, 34 bp, synthetic construct; identical to SEQ ID NO: 2104
  misc_feature 1..34: note = Probe
  source 1..34: mol_type = other DNA

SEQ ID NO: 51904 - DNA, 35 bp, synthetic construct; identical to SEQ ID NO: 2105
  misc_feature 1..35: note = Probe
  source 1..35: mol_type = other DNA

SEQ ID NO: 51905 - DNA, 18 bp, synthetic construct
  misc_feature 1..18: note = Probe
  source 1..18: mol_type = other DNA
aaccgggcggaaacacac

SEQ ID NO: 51906 - DNA, 19 bp, synthetic construct
  misc_feature 1..19: note = Probe
  source 1..19: mol_type = other DNA
aaccgggcggaaacacact

SEQ ID NO: 51907 - DNA, 20 bp, synthetic construct
  misc_feature 1..20: note = Probe
  source 1..20: mol_type = other DNA
aaccgggcggaaacacacta

SEQ ID NO: 51908 - DNA, 21 bp, synthetic construct
  misc_feature 1..21: note = Probe
  source 1..21: mol_type = other DNA
aaccgggcggaaacacactaa

SEQ ID NO: 51909 - DNA, 17 bp, synthetic construct
  misc_feature 1..17: note = Probe
  source 1..17: mol_type = other DNA
aaccgggcggaaacacc

SEQ ID NO: 51910 - DNA, 18 bp, synthetic construct
  misc_feature 1..18: note = Probe
  source 1..18: mol_type = other DNA
aaccgggcggaaacacct

SEQ ID NO: 51911 - DNA, 19 bp, synthetic construct
  misc_feature 1..19: note = Probe
  source 1..19: mol_type = other DNA
aaccgggcggaaacacctc

SEQ ID NO: 51912 - DNA, 20 bp, synthetic construct
  misc_feature 1..20: note = Probe
  source 1..20: mol_type = other DNA
aaccgggcggaaacacctcc

SEQ ID NO: 51913 - DNA, 21 bp, synthetic construct
  misc_feature 1..21: note = Probe
  source 1..21: mol_type = other DNA
aaccgggcggaaacacctcct

SEQ ID NO: 51914 - DNA, 22 bp, synthetic construct
  misc_feature 1..22: note = Probe
  source 1..22: mol_type = other DNA
aaccgggcggaaacacctcctt

SEQ ID NO: 51915 - DNA, 18 bp, synthetic construct
  misc_feature 1..18: note = Probe
  source 1..18: mol_type = other DNA
aaccgggcggaaacacgt

SEQ ID NO: 51916 - DNA, 19 bp, synthetic construct
  misc_feature 1..19: note = Probe
  source 1..19: mol_type = other DNA
aaccgggcggaaacacgtt

SEQ ID NO: 51917 - DNA, 20 bp, synthetic construct
  misc_feature 1..20: note = Probe
  source 1..20: mol_type = other DNA
aaccgggcggaaacacgttt

SEQ ID NO: 51918 - DNA, 21 bp, synthetic construct
  misc_feature 1..21: note = Probe
  source 1..21: mol_type = other DNA
aaccgggcggaaacacgtttt

SEQ ID NO: 51919 - DNA, 22 bp, synthetic construct
  misc_feature 1..22: note = Probe
  source 1..22: mol_type = other DNA
aaccgggcggaaacacgttttt

SEQ ID NO: 51920 - DNA, 23 bp, synthetic construct
  misc_feature 1..23: note = Probe
  source 1..23: mol_type = other DNA
aaccgggcggaaacacgtttttt

SEQ ID NO: 51921 - DNA, 20 bp, synthetic construct
  misc_feature 1..20: note = Probe
  source 1..20: mol_type = other DNA
aaccgggcggaaacaggtag

SEQ ID NO: 51922 - DNA, 21 bp, synthetic construct
  misc_feature 1..21: note = Probe
  source 1..21: mol_type = other DNA
aaccgggcggaaacaggtagg

SEQ ID NO: 51923 - DNA, 26 bp, synthetic construct
  misc_feature 1..26: note = Probe
  source 1..26: mol_type = other DNA
aacctagccccaaacccactccacct

SEQ ID NO: 51924 - DNA, 26 bp, synthetic construct
  misc_feature 1..26: note = Probe
  source 1..26: mol_type = other DNA
aacctgccggggcttctcccgccttt

SEQ ID NO: 51925 - DNA, 27 bp, synthetic construct
  misc_feature 1..27: note = Probe
  source 1..27: mol_type = other DNA
aacctgccggggcttctcccgcctttt

SEQ ID NO: 51926 - DNA, 49 bp, synthetic construct; identical to SEQ ID NO: 43996
  misc_feature 1..49: note = Probe
  source 1..49: mol_type = other DNA

SEQ ID NO: 51927 - DNA, 50 bp, synthetic construct; identical to SEQ ID NO: 2121
  misc_feature 1..50: note = Probe
  source 1..50: mol_type = other DNA

SEQ ID NO: 51928 - DNA, 49 bp, synthetic construct; identical to SEQ ID NO: 2124
  misc_feature 1..49: note = Probe
  source 1..49: mol_type = other DNA

SEQ ID NO: 51929 - DNA, 50 bp, synthetic construct; identical to SEQ ID NO: 2125
  misc_feature 1..50: note = Probe
  source 1..50: mol_type = other DNA

SEQ ID NO: 51930 - DNA, 40 bp, synthetic construct; identical to SEQ ID NO: 2131
  misc_feature 1..40: note = Probe
  source 1..40: mol_type = other DNA

SEQ ID NO: 51931 - DNA, 50 bp, synthetic construct
  misc_feature 1..50: note = Probe
  source 1..50: mol_type = other DNA
aactaatacaccagtcttgtaaaccggagatgaaaacctttttccaagga

SEQ ID NO: 51932 - DNA, 19 bp, synthetic construct
  misc_feature 1..19: note = Probe
  source 1..19: mol_type = other DNA
aactcatgcccccatgtct

SEQ ID NO: 51933 - DNA, 20 bp, synthetic construct
  misc_feature 1..20: note = Probe
  source 1..20: mol_type = other DNA
aactcatgcccccatgtcta

SEQ ID NO: 51934 - DNA, 26 bp, synthetic construct
  misc_feature 1..26: note = Probe
  source 1..26: mol_type = other DNA
aactcatgcccccatgtctaacaaca

SEQ ID NO: 51935 - DNA, 31 bp, synthetic construct; identical to SEQ ID NO: 2140
  misc_feature 1..31: note = Probe
  source 1..31: mol_type = other DNA

SEQ ID NO: 51936 - DNA, 32 bp, synthetic construct; identical to SEQ ID NO: 2141
  misc_feature 1..32: note = Probe
  source 1..32: mol_type = other DNA

SEQ ID NO: 51937 - DNA, 33 bp, synthetic construct; identical to SEQ ID NO: 2142
  misc_feature 1..33: note = Probe
  source 1..33: mol_type = other DNA

SEQ ID NO: 51938 - DNA, 34 bp, synthetic construct; identical to SEQ ID NO: 2143
  misc_feature 1..34: note = Probe
  source 1..34: mol_type = other DNA

SEQ ID NO: 51939 - DNA, 35 bp, synthetic construct; identical to SEQ ID NO: 2144
  misc_feature 1..35: note = Probe
  source 1..35: mol_type = other DNA

SEQ ID NO: 51940 - DNA, 36 bp, synthetic construct; identical to SEQ ID NO: 2145
  misc_feature 1..36: note = Probe
  source 1..36: mol_type = other DNA

SEQ ID NO: 51941 - DNA, 37 bp, synthetic construct; identical to SEQ ID NO: 2146
  misc_feature 1..37: note = Probe
  source 1..37: mol_type = other DNA

SEQ ID NO: 51942 - DNA, 38 bp, synthetic construct; identical to SEQ ID NO: 2147
  misc_feature 1..38: note = Probe
  source 1..38: mol_type = other DNA

SEQ ID NO: 51943 - DNA, 39 bp, synthetic construct; identical to SEQ ID NO: 2148
  misc_feature 1..39: note = Probe
  source 1..39: mol_type = other DNA

SEQ ID NO: 51944 - DNA, 40 bp, synthetic construct; identical to SEQ ID NO: 2149
  misc_feature 1..40: note = Probe
  source 1..40: mol_type = other DNA

SEQ ID NO: 51945 - DNA, 41 bp, synthetic construct; identical to SEQ ID NO: 14876
  misc_feature 1..41: note = Probe
  source 1..41: mol_type = other DNA

SEQ ID NO: 51946 - DNA, 43 bp, synthetic construct; identical to SEQ ID NO: 14877
  misc_feature 1..43: note = Probe
  source 1..43: mol_type = other DNA

SEQ ID NO: 51947 - DNA, 15 bp, synthetic construct
  misc_feature 1..15: note = Probe
  source 1..15: mol_type = other DNA
aactgctaactcatg

SEQ ID NO: 51948 - DNA, 27 bp, synthetic construct
  misc_feature 1..27: note = Probe
  source 1..27: mol_type = other DNA
aactgctaactcatgcccccatgtcta

SEQ ID NO: 51949 - DNA, 38 bp, synthetic construct; identical to SEQ ID NO: 2157
  misc_feature 1..38: note = Probe
  source 1..38: mol_type = other DNA

SEQ ID NO: 51950 - DNA, 39 bp, synthetic construct; identical to SEQ ID NO: 2158
  misc_feature 1..39: note = Probe
  source 1..39: mol_type = other DNA

SEQ ID NO: 51951 - DNA, 40 bp, synthetic construct; identical to SEQ ID NO: 2159
  misc_feature 1..40: note = Probe
  source 1..40: mol_type = other DNA

SEQ ID NO: 51952 - DNA, 41 bp, synthetic construct; identical to SEQ ID NO: 2160
  misc_feature 1..41: note = Probe
  source 1..41: mol_type = other DNA

SEQ ID NO: 51953 - DNA, 42 bp, synthetic construct; identical to SEQ ID NO: 2161
  misc_feature 1..42: note = Probe
  source 1..42: mol_type = other DNA

SEQ ID NO: 51954 - DNA, 43 bp, synthetic construct; identical to SEQ ID NO: 2162
  misc_feature 1..43: note = Probe
  source 1..43: mol_type = other DNA

SEQ ID NO: 51955 - DNA, 44 bp, synthetic construct; identical to SEQ ID NO: 2163
  misc_feature 1..44: note = Probe
  source 1..44: mol_type = other DNA

SEQ ID NO: 51956 - DNA, 45 bp, synthetic construct; identical to SEQ ID NO: 2164
  misc_feature 1..45: note = Probe
  source 1..45: mol_type = other DNA

SEQ ID NO: 51957 - DNA, 46 bp, synthetic construct; identical to SEQ ID NO: 2165
  misc_feature 1..46: note = Probe
  source 1..46: mol_type = other DNA

SEQ ID NO: 51958 - DNA, 26 bp, synthetic construct
  misc_feature 1..26: note = Probe
  source 1..26: mol_type = other DNA
aacttaaaactttacagtcagaggtt

SEQ ID NO: 51959 - DNA, 28 bp, synthetic construct
  misc_feature 1..28: note = Probe
  source 1..28: mol_type = other DNA
aacttaaaactttacagtcagaggttca

SEQ ID NO: 51960 - DNA, 29 bp, synthetic construct
  misc_feature 1..29: note = Probe
  source 1..29: mol_type = other DNA
aacttaaaactttacagtcagaggttcaa

SEQ ID NO: 51961 - DNA, 30 bp, synthetic construct; identical to SEQ ID NO: 2170
  misc_feature 1..30: note = Probe
  source 1..30: mol_type = other DNA

SEQ ID NO: 51962 - DNA, 37 bp, synthetic construct; identical to SEQ ID NO: 60
  misc_feature 1..37: note = Probe
  source 1..37: mol_type = other DNA

SEQ ID NO: 51963 - DNA, 39 bp, synthetic construct; identical to SEQ ID NO: 62
  misc_feature 1..39: note = Probe
  source 1..39: mol_type = other DNA

SEQ ID NO: 51964 - DNA, 40 bp, synthetic construct; identical to SEQ ID NO: 2173
  misc_feature 1..40: note = Probe
  source 1..40: mol_type = other DNA

SEQ ID NO: 51965 - DNA, 41 bp, synthetic construct; identical to SEQ ID NO: 2174
  misc_feature 1..41: note = Probe
  source 1..41: mol_type = other DNA

SEQ ID NO: 51966 - DNA, 42 bp, synthetic construct; identical to SEQ ID NO: 2175
  misc_feature 1..42: note = Probe
  source 1..42: mol_type = other DNA

SEQ ID NO: 51967 - DNA, 43 bp, synthetic construct; identical to SEQ ID NO: 2176
  misc_feature 1..43: note = Probe
  source 1..43: mol_type = other DNA

SEQ ID NO: 51968 - DNA, 44 bp, synthetic construct; identical to SEQ ID NO: 2177
  misc_feature 1..44: note = Probe
  source 1..44: mol_type = other DNA

SEQ ID NO: 51969 - DNA, 45 bp, synthetic construct; identical to SEQ ID NO: 2178
  misc_feature 1..45: note = Probe
  source 1..45: mol_type = other DNA

SEQ ID NO: 51970 - DNA, 46 bp, synthetic construct; identical to SEQ ID NO: 2179
  misc_feature 1..46: note = Probe
  source 1..46: mol_type = other DNA

SEQ ID NO: 51971 - DNA, 50 bp, synthetic construct; identical to SEQ ID NO: 2180
  misc_feature 1..50: note = Probe
  source 1..50: mol_type = other DNA

SEQ ID NO: 51972 - DNA, 24 bp, synthetic construct
  misc_feature 1..24: note = Probe
  source 1..24: mol_type = other DNA
aacttaacttgaccgctctgagct

SEQ ID NO: 51973 - DNA, 44 bp, synthetic construct; identical to SEQ ID NO: 2194
  misc_feature 1..44: note = Probe
  source 1..44: mol_type = other DNA

SEQ ID NO: 51974 - DNA, 45 bp, synthetic construct; identical to SEQ ID NO: 2195
  misc_feature 1..45: note = Probe
  source 1..45: mol_type = other DNA

SEQ ID NO: 51975 - DNA, 45 bp, synthetic construct; identical to SEQ ID NO: 2203
  misc_feature 1..45: note = Probe
  source 1..45: mol_type = other DNA

SEQ ID NO: 51976 - DNA, 20 bp, synthetic construct
  misc_feature 1..20: note = Probe
  source 1..20: mol_type = other DNA
aactttacagtcagaggttc

SEQ ID NO: 51977 - DNA, 21 bp, synthetic construct
  misc_feature 1..21: note = Probe
  source 1..21: mol_type = other DNA
aactttacagtcagaggttca

SEQ ID NO: 51978 - DNA, 22 bp, synthetic construct
  misc_feature 1..22: note = Probe
  source 1..22: mol_type = other DNA
aactttacagtcagaggttcaa

SEQ ID NO: 51979 - DNA, 23 bp, synthetic construct
  misc_feature 1..23: note = Probe
  source 1..23: mol_type = other DNA
aactttacagtcagaggttcaat

SEQ ID NO: 51980 - DNA, 24 bp, synthetic construct
  misc_feature 1..24: note = Probe
  source 1..24: mol_type = other DNA
aactttacagtcagaggttcaatt

SEQ ID NO: 51981 - DNA, 26 bp, synthetic construct
  misc_feature 1..26: note = Probe
  source 1..26: mol_type = other DNA
aactttacagtcagaggttcaattcc

SEQ ID NO: 51982 - DNA, 30 bp, synthetic construct; identical to SEQ ID NO: 64
  misc_feature 1..30: note = Probe
  source 1..30: mol_type = other DNA

SEQ ID NO: 51983 - DNA, 31 bp, synthetic construct; identical to SEQ ID NO: 65
  misc_feature 1..31: note = Probe
  source 1..31: mol_type = other DNA

SEQ ID NO: 51984 - DNA, 32 bp, synthetic construct; identical to SEQ ID NO: 2206
  misc_feature 1..32: note = Probe
  source 1..32: mol_type = other DNA

SEQ ID NO: 51985 - DNA, 33 bp, synthetic construct; identical to SEQ ID NO: 2207
  misc_feature 1..33: note = Probe
  source 1..33: mol_type = other DNA

SEQ ID NO: 51986 - DNA, 34 bp, synthetic construct; identical to SEQ ID NO: 2208
  misc_feature 1..34: note = Probe
  source 1..34: mol_type = other DNA

SEQ ID NO: 51987 - DNA, 35 bp, synthetic construct; identical to SEQ ID NO: 2209
  misc_feature 1..35: note = Probe
  source 1..35: mol_type = other DNA

SEQ ID NO: 51988 - DNA, 36 bp, synthetic construct; identical to SEQ ID NO: 2210
  misc_feature 1..36: note = Probe
  source 1..36: mol_type = other DNA

SEQ ID NO: 51989 - DNA, 37 bp, synthetic construct; identical to SEQ ID NO: 2211
  misc_feature 1..37: note = Probe
  source 1..37: mol_type = other DNA

SEQ ID NO: 51990 - DNA, 38 bp, synthetic construct; identical to SEQ ID NO: 2212
  misc_feature 1..38: note = Probe
  source 1..38: mol_type = other DNA

SEQ ID NO: 51991 - DNA, 39 bp, synthetic construct; identical to SEQ ID NO: 2213
  misc_feature 1..39: note = Probe
  source 1..39: mol_type = other DNA

SEQ ID NO: 51992 - DNA, 40 bp, synthetic construct; identical to SEQ ID NO: 2214
  misc_feature 1..40: note = Probe
  source 1..40: mol_type = other DNA

SEQ ID NO: 51993 - DNA, 17 bp, synthetic construct
  misc_feature 1..17: note = Probe
  source 1..17: mol_type = other DNA
aagaacagggtttgtta

SEQ ID NO: 51994 - DNA, 18 bp, synthetic construct
  misc_feature 1..18: note = Probe
  source 1..18: mol_type = other DNA
aagaactgctaactcatg

SEQ ID NO: 51995 - DNA, 41 bp, synthetic construct; identical to SEQ ID NO: 66
  misc_feature 1..41: note = Probe
  source 1..41: mol_type = other DNA

SEQ ID NO: 51996 - DNA, 42 bp, synthetic construct; identical to SEQ ID NO: 2227
  misc_feature 1..42: note = Probe
  source 1..42: mol_type = other DNA

SEQ ID NO: 51997 - DNA, 43 bp, synthetic construct; identical to SEQ ID NO: 67
  misc_feature 1..43: note = Probe
  source 1..43: mol_type = other DNA

SEQ ID NO: 51998 - DNA, 44 bp, synthetic construct; identical to SEQ ID NO: 68
  misc_feature 1..44: note = Probe
  source 1..44: mol_type = other DNA

SEQ ID NO: 51999 - DNA, 45 bp, synthetic construct; identical to SEQ ID NO: 69
  misc_feature 1..45: note = Probe
  source 1..45: mol_type = other DNA

SEQ ID NO: 52000 - DNA, 46 bp, synthetic construct; identical to SEQ ID NO: 70
  misc_feature 1..46: note = Probe
  source 1..46: mol_type = other DNA

SEQ ID NO: 52001 - DNA, 49 bp, synthetic construct; identical to SEQ ID NO: 2229
  misc_feature 1..49: note = Probe
  source 1..49: mol_type = other DNA

SEQ ID NO: 52002 - DNA, 50 bp, synthetic construct; identical to SEQ ID NO: 2230
  misc_feature 1..50: note = Probe
  source 1..50: mol_type = other DNA

SEQ ID NO: 52003 - DNA, 32 bp, synthetic construct; identical to SEQ ID NO: 2233
  misc_feature 1..32: note = Probe
  source 1..32: mol_type = other DNA

SEQ ID NO: 52004 - DNA, 35 bp, synthetic construct; identical to SEQ ID NO: 14994
  misc_feature 1..35: note = Probe
  source 1..35: mol_type = other DNA

SEQ ID NO: 52005 - DNA, 50 bp, synthetic construct; identical to SEQ ID NO: 2241
  misc_feature 1..50: note = Probe
  source 1..50: mol_type = other DNA

SEQ ID NO: 52006 - DNA, 23 bp, synthetic construct
  misc_feature 1..23: note = Probe
  source 1..23: mol_type = other DNA
aagacaggggttaggcctctttt

SEQ ID NO: 52007 - DNA, 30 bp, synthetic construct; identical to SEQ ID NO: 2251
  misc_feature 1..30: note = Probe
  source 1..30: mol_type = other DNA

SEQ ID NO: 52008 - DNA, 46 bp, synthetic construct
  misc_feature 1..46: note = Probe
  source 1..46: mol_type = other DNA
aagagttactttgatagagtaaataataggagcttaaaccccctta

SEQ ID NO: 52009 - DNA, 32 bp, synthetic construct; identical to SEQ ID NO: 2257
  misc_feature 1..32: note = Probe
  source 1..32: mol_type = other DNA

SEQ ID NO: 52010 - DNA, 33 bp, synthetic construct; identical to SEQ ID NO: 2258
  misc_feature 1..33: note = Probe
  source 1..33: mol_type = other DNA

SEQ ID NO: 52011 - DNA, 36 bp, synthetic construct; identical to SEQ ID NO: 2260
  misc_feature 1..36: note = Probe
  source 1..36: mol_type = other DNA

SEQ ID NO: 52012 - DNA, 50 bp, synthetic construct; identical to SEQ ID NO: 2283
  misc_feature 1..50: note = Probe
  source 1..50: mol_type = other DNA

SEQ ID NO: 52013 - DNA, 31 bp, synthetic construct
  misc_feature 1..31: note = Probe
  source 1..31: mol_type = other DNA
aagcatagctgccttccaagcagttgacccg

SEQ ID NO: 52014 - DNA, 22 bp, synthetic construct
  misc_feature 1..22: note = Probe
  source 1..22: mol_type = other DNA
aagctatcgggcccataccccg

SEQ ID NO: 52015 - DNA, 25 bp, synthetic construct
  misc_feature 1..25: note = Probe
  source 1..25: mol_type = other DNA
aagctatcgggcccataccccgaaa

SEQ ID NO: 52016 - DNA, 26 bp, synthetic construct
  misc_feature 1..26: note = Probe
  source 1..26: mol_type = other DNA
aagctatcgggcccataccccgaaaa

SEQ ID NO: 52017 - DNA, 27 bp, synthetic construct
  misc_feature 1..27: note = Probe
  source 1..27: mol_type = other DNA
aagctatcgggcccataccccgaaaat

SEQ ID NO: 52018 - DNA, 28 bp, synthetic construct
  misc_feature 1..28: note = Probe
  source 1..28: mol_type = other DNA
aagctatcgggcccataccccgaaaatg

SEQ ID NO: 52019 - DNA, 29 bp, synthetic construct
  misc_feature 1..29: note = Probe
  source 1..29: mol_type = other DNA
aagctatcgggcccataccccgaaaatgt

SEQ ID NO: 52020 - DNA, 30 bp, synthetic construct; identical to SEQ ID NO: 2306
  misc_feature 1..30: note = Probe
  source 1..30: mol_type = other DNA

SEQ ID NO: 52021 - DNA, 31 bp, synthetic construct; identical to SEQ ID NO: 2307
  misc_feature 1..31: note = Probe
  source 1..31: mol_type = other DNA

SEQ ID NO: 52022 - DNA, 50 bp, synthetic construct; identical to SEQ ID NO: 80
  misc_feature 1..50: note = Probe
  source 1..50: mol_type = other DNA

SEQ ID NO: 52023 - DNA, 26 bp, synthetic construct
  misc_feature 1..26: note = Probe
  source 1..26: mol_type = other DNA
aagctcacaagaactgctaactcatg

SEQ ID NO: 52024 - DNA, 50 bp, synthetic construct; identical to SEQ ID NO: 84
  misc_feature 1..50: note = Probe
  source 1..50: mol_type = other DNA

SEQ ID NO: 52025 - DNA, 25 bp, synthetic construct
  misc_feature 1..25: note = Probe
  source 1..25: mol_type = other DNA
aaggtattagaaaaaccatttcata

SEQ ID NO: 52026 - DNA, 28 bp, synthetic construct
  misc_feature 1..28: note = Probe
  source 1..28: mol_type = other DNA
aaggtattagaaaaaccatttcataact

SEQ ID NO: 52027 - DNA, 25 bp, synthetic construct
  misc_feature 1..25: note = Probe
  source 1..25: mol_type = other DNA
aaggtcagctaaataagctatcggg

SEQ ID NO: 52028 - DNA, 26 bp, synthetic construct
  misc_feature 1..26: note = Probe
  source 1..26: mol_type = other DNA
aaggtcagctaaataagctatcgggc

SEQ ID NO: 52029 - DNA, 27 bp, synthetic construct
  misc_feature 1..27: note = Probe
  source 1..27: mol_type = other DNA
aaggtcagctaaataagctatcgggcc

SEQ ID NO: 52030 - DNA, 29 bp, synthetic construct
  misc_feature 1..29: note = Probe
  source 1..29: mol_type = other DNA
aaggtcagctaaataagctatcgggccca

SEQ ID NO: 52031 - DNA, 30 bp, synthetic construct; identical to SEQ ID NO: 2342
  misc_feature 1..30: note = Probe
  source 1..30: mol_type = other DNA

SEQ ID NO: 52032 - DNA, 31 bp, synthetic construct; identical to SEQ ID NO: 2343
  misc_feature 1..31: note = Probe
  source 1..31: mol_type = other DNA

SEQ ID NO: 52033 - DNA, 32 bp, synthetic construct; identical to SEQ ID NO: 2344
  misc_feature 1..32: note = Probe
  source 1..32: mol_type = other DNA

SEQ ID NO: 52034 - DNA, 33 bp, synthetic construct; identical to SEQ ID NO: 2345
  misc_feature 1..33: note = Probe
  source 1..33: mol_type = other DNA

SEQ ID NO: 52035 - DNA, 34 bp, synthetic construct; identical to SEQ ID NO: 2346
  misc_feature 1..34: note = Probe
  source 1..34: mol_type = other DNA

SEQ ID NO: 52036 - DNA, 35 bp, synthetic construct; identical to SEQ ID NO: 15140
  misc_feature 1..35: note = Probe
  source 1..35: mol_type = other DNA

SEQ ID NO: 52037 - DNA, 39 bp, synthetic construct; identical to SEQ ID NO: 2348
  misc_feature 1..39: note = Probe
  source 1..39: mol_type = other DNA

SEQ ID NO: 52038 - DNA, 40 bp, synthetic construct; identical to SEQ ID NO: 2349
  misc_feature 1..40: note = Probe
  source 1..40: mol_type = other DNA

SEQ ID NO: 52039 - DNA, 41 bp, synthetic construct; identical to SEQ ID NO: 2350
  misc_feature 1..41: note = Probe
  source 1..41: mol_type = other DNA

SEQ ID NO: 52040 - DNA, 42 bp, synthetic construct; identical to SEQ ID NO: 2351
  misc_feature 1..42: note = Probe
  source 1..42: mol_type = other DNA

SEQ ID NO: 52041 - DNA, 43 bp, synthetic construct; identical to SEQ ID NO: 2352
  misc_feature 1..43: note = Probe
  source 1..43: mol_type = other DNA

SEQ ID NO: 52042 - DNA, 44 bp, synthetic construct; identical to SEQ ID NO: 2353
  misc_feature 1..44: note = Probe
  source 1..44: mol_type = other DNA

SEQ ID NO: 52043 - DNA, 45 bp, synthetic construct; identical to SEQ ID NO: 2354
  misc_feature 1..45: note = Probe
  source 1..45: mol_type = other DNA

SEQ ID NO: 52044 - DNA, 46 bp, synthetic construct; identical to SEQ ID NO: 2355
  misc_feature 1..46: note = Probe
  source 1..46: mol_type = other DNA

SEQ ID NO: 52045 - DNA, 50 bp, synthetic construct; identical to SEQ ID NO: 2358
  misc_feature 1..50: note = Probe
  source 1..50: mol_type = other DNA

SEQ ID NO: 52046 - DNA, 26 bp, synthetic construct
  misc_feature 1..26: note = Probe
  source 1..26: mol_type = other DNA
aagtgtactggaaagtgcacttggac

SEQ ID NO: 52047 - DNA, 27 bp, synthetic construct
  misc_feature 1..27: note = Probe
  source 1..27: mol_type = other DNA
aagtgtactggaaagtgcacttggacg

SEQ ID NO: 52048 - DNA, 28 bp, synthetic construct
  misc_feature 1..28: note = Probe
  source 1..28: mol_type = other DNA
aagtgtactggaaagtgcacttggacga

SEQ ID NO: 52049 - DNA, 29 bp, synthetic construct
  misc_feature 1..29: note = Probe
  source 1..29: mol_type = other DNA
aagtgtactggaaagtgcacttggacgaa

SEQ ID NO: 52050 - DNA, 30 bp, synthetic construct; identical to SEQ ID NO: 2379
  misc_feature 1..30: note = Probe
  source 1..30: mol_type = other DNA

SEQ ID NO: 52051 - DNA, 31 bp, synthetic construct; identical to SEQ ID NO: 2380
  misc_feature 1..31: note = Probe
  source 1..31: mol_type = other DNA

SEQ ID NO: 52052 - DNA, 32 bp, synthetic construct; identical to SEQ ID NO: 2381
  misc_feature 1..32: note = Probe
  source 1..32: mol_type = other DNA

SEQ ID NO: 52053 - DNA, 33 bp, synthetic construct; identical to SEQ ID NO: 2382
  misc_feature 1..33: note = Probe
  source 1..33: mol_type = other DNA

SEQ ID NO: 52054 - DNA, 34 bp, synthetic construct; identical to SEQ ID NO: 2383
  misc_feature 1..34: note = Probe
  source 1..34: mol_type = other DNA

SEQ ID NO: 52055 - DNA, 35 bp, synthetic construct; identical to SEQ ID NO: 2384
  misc_feature 1..35: note = Probe
  source 1..35: mol_type = other DNA

SEQ ID NO: 52056 - DNA, 29 bp, synthetic construct
  misc_feature 1..29: note = Probe
  source 1..29: mol_type = other DNA
aagtgtttgtgggtttaagtcccattggt

SEQ ID NO: 52057 - DNA, 42 bp, synthetic construct; identical to SEQ ID NO: 2399
  misc_feature 1..42: note = Probe
  source 1..42: mol_type = other DNA

SEQ ID NO: 52058 - DNA, 21 bp, synthetic construct
  misc_feature 1..21: note = Probe
  source 1..21: mol_type = other DNA
aataacgccaaggtcgcgggt

SEQ ID NO: 52059 - DNA, 30 bp, synthetic construct; identical to SEQ ID NO: 2407
  misc_feature 1..30: note = Probe
  source 1..30: mol_type = other DNA

SEQ ID NO: 52060 - DNA, 50 bp, synthetic construct; identical to SEQ ID NO: 2414
  misc_feature 1..50: note = Probe
  source 1..50: mol_type = other DNA

SEQ ID NO: 52061 - DNA, 30 bp, synthetic construct; identical to SEQ ID NO: 2424
  misc_feature 1..30: note = Probe
  source 1..30: mol_type = other DNA

SEQ ID NO: 52062 - DNA, 21 bp, synthetic construct
  misc_feature 1..21: note = Probe
  source 1..21: mol_type = other DNA
aatcagtgcccggctagctca

SEQ ID NO: 52063 - DNA, 18 bp, synthetic construct
  misc_feature 1..18: note = Probe
  source 1..18: mol_type = other DNA
aatccagcgatccgagtt

SEQ ID NO: 52064 - DNA, 19 bp, synthetic construct
  misc_feature 1..19: note = Probe
  source 1..19: mol_type = other DNA
aatccagcgatccgagttc

SEQ ID NO: 52065 - DNA, 20 bp, synthetic construct
  misc_feature 1..20: note = Probe
  source 1..20: mol_type = other DNA
aatccagcgatccgagttca

SEQ ID NO: 52066 - DNA, 22 bp, synthetic construct
  misc_feature 1..22: note = Probe
  source 1..22: mol_type = other DNA
aatccagcgatccgagttcaaa

SEQ ID NO: 52067 - DNA, 38 bp, synthetic construct; identical to SEQ ID NO: 2431
  misc_feature 1..38: note = Probe
  source 1..38: mol_type = other DNA

SEQ ID NO: 52068 - DNA, 39 bp, synthetic construct; identical to SEQ ID NO: 2432
  misc_feature 1..39: note = Probe
  source 1..39: mol_type = other DNA

SEQ ID NO: 52069 - DNA, 38 bp, synthetic construct; identical to SEQ ID NO: 2435
  misc_feature 1..38: note = Probe
  source 1..38: mol_type = other DNA

SEQ ID NO: 52070 - DNA, 38 bp, synthetic construct; identical to SEQ ID NO: 2437
  misc_feature 1..38: note = Probe
  source 1..38: mol_type = other DNA

SEQ ID NO: 52071 - DNA, 38 bp, synthetic construct; identical to SEQ ID NO: 2441
  misc_feature 1..38: note = Probe
  source 1..38: mol_type = other DNA

SEQ ID NO: 52072 - DNA, 39 bp, synthetic construct; identical to SEQ ID NO: 2442
  misc_feature 1..39: note = Probe
  source 1..39: mol_type = other DNA

SEQ ID NO: 52073 - DNA, 18 bp, synthetic construct
  misc_feature 1..18: note = Probe
  source 1..18: mol_type = other DNA
aatcccaccgctgccaca

SEQ ID NO: 52074 - DNA, 19 bp, synthetic construct
  misc_feature 1..19: note = Probe
  source 1..19: mol_type = other DNA
aatcccaccgctgccacac

SEQ ID NO: 52075 - DNA, 19 bp, synthetic construct
  misc_feature 1..19: note = Probe
  source 1..19: mol_type = other DNA
aatcccaccgctgccagct

SEQ ID NO: 52076 - DNA, 19 bp, synthetic construct
  misc_feature 1..19: note = Probe
  source 1..19: mol_type = other DNA
aatcccaccgctgccaggt

SEQ ID NO: 52077 - DNA, 21 bp, synthetic construct
  misc_feature 1..21: note = Probe
  source 1..21: mol_type = other DNA
aatcccaccgctgccaggttt

SEQ ID NO: 52078 - DNA, 22 bp, synthetic construct
  misc_feature 1..22: note = Probe
  source 1..22: mol_type = other DNA
aatcccaccgctgccaggttta

SEQ ID NO: 52079 - DNA, 19 bp, synthetic construct
  misc_feature 1..19: note = Probe
  source 1..19: mol_type = other DNA
aatcccagcggtgcctccg

SEQ ID NO: 52080 - DNA, 20 bp, synthetic construct
  misc_feature 1..20: note = Probe
  source 1..20: mol_type = other DNA
aatcccatcctcgtcgctcg

SEQ ID NO: 52081 - DNA, 21 bp, synthetic construct
  misc_feature 1..21: note = Probe
  source 1..21: mol_type = other DNA
aatcccatcctcgtcgctcgg

SEQ ID NO: 52082 - DNA, 21 bp, synthetic construct
  misc_feature 1..21: note = Probe
  source 1..21: mol_type = other DNA
aatcccatcctcgtcggctaa

SEQ ID NO: 52083 - DNA, 22 bp, synthetic construct
  misc_feature 1..22: note = Probe
  source 1..22: mol_type = other DNA
aatcccggacgagcccacttca

SEQ ID NO: 52084 - DNA, 17 bp, synthetic construct
  misc_feature 1..17: note = Probe
  source 1..17: mol_type = other DNA
aatcccggacgagcccc

SEQ ID NO: 52085 - DNA, 18 bp, synthetic construct
  misc_feature 1..18: note = Probe
  source 1..18: mol_type = other DNA
aatcccggacgagccccc

SEQ ID NO: 52086 - DNA, 21 bp, synthetic construct
  misc_feature 1..21: note = Probe
  source 1..21: mol_type = other DNA
aatcccggacgagcccccttt

SEQ ID NO: 52087 - DNA, 22 bp, synthetic construct
  misc_feature 1..22: note = Probe
  source 1..22: mol_type = other DNA
aatcccggacgagccccctttt

SEQ ID NO: 52088 - DNA, 21 bp, synthetic construct
  misc_feature 1..21: note = Probe
  source 1..21: mol_type = other DNA
aatcccggacgagccctcatt

SEQ ID NO: 52089 - DNA, 22 bp, synthetic construct
  misc_feature 1..22: note = Probe
  source 1..22: mol_type = other DNA
aatcccggacgagccctcattt

SEQ ID NO: 52090 - DNA, 19 bp, synthetic construct
  misc_feature 1..19: note = Probe
  source 1..19: mol_type = other DNA
aatccgggtgccccctcaa

SEQ ID NO: 52091 - DNA, 20 bp, synthetic construct
  misc_feature 1..20: note = Probe
  source 1..20: mol_type = other DNA
aatccgggtgccccctcaat

SEQ ID NO: 52092 - DNA, 21 bp, synthetic construct
  misc_feature 1..21: note = Probe
  source 1..21: mol_type = other DNA
aatccgggtgccccctcaatg

SEQ ID NO: 52093 - DNA, 22 bp, synthetic construct
  misc_feature 1..22: note = Probe
  source 1..22: mol_type = other DNA
aatccgggtgccccctcaatgg

SEQ ID NO: 52094 - DNA, 21 bp, synthetic construct
  misc_feature 1..21: note = Probe
  source 1..21: mol_type = other DNA
aatccgggtgccccctcacag

SEQ ID NO: 52095 - DNA, 22 bp, synthetic construct
  misc_feature 1..22: note = Probe
  source 1..22: mol_type = other DNA
aatccgggtgccccctcacagc

SEQ ID NO: 52096 - DNA, 19 bp, synthetic construct
  misc_feature 1..19: note = Probe
  source 1..19: mol_type = other DNA
aatccgggtgccccctctt

SEQ ID NO: 52097 - DNA, 20 bp, synthetic construct
  misc_feature 1..20: note = Probe
  source 1..20: mol_type = other DNA
aatccgggtgccccctcttt

SEQ ID NO: 52098 - DNA, 19 bp, synthetic construct
  misc_feature 1..19: note = Probe
  source 1..19: mol_type = other DNA
aatcctatatatcttaatg

SEQ ID NO: 52099 - DNA, 19 bp, synthetic construct
  misc_feature 1..19: note = Probe
  source 1..19: mol_type = other DNA
aatcctgccgactacggca

SEQ ID NO: 52100 - DNA, 19 bp, synthetic construct
  misc_feature 1..19: note = Probe
  source 1..19: mol_type = other DNA
aatcctgccgactacgtca

SEQ ID NO: 52101 - DNA, 29 bp, synthetic construct
  misc_feature 1..29: note = Probe
  source 1..29: mol_type = other DNA
aatcgcataaaacttaaaactttacagtc

SEQ ID NO: 52102 - DNA, 30 bp, synthetic construct; identical to SEQ ID NO: 2459
  misc_feature 1..30: note = Probe
  source 1..30: mol_type = other DNA

SEQ ID NO: 52103 - DNA, 37 bp, synthetic construct; identical to SEQ ID NO: 2460
  misc_feature 1..37: note = Probe
  source 1..37: mol_type = other DNA

SEQ ID NO: 52104 - DNA, 38 bp, synthetic construct; identical to SEQ ID NO: 15261
  misc_feature 1..38: note = Probe
  source 1..38: mol_type = other DNA

SEQ ID NO: 52105 - DNA, 39 bp, synthetic construct; identical to SEQ ID NO: 2461
  misc_feature 1..39: note = Probe
  source 1..39: mol_type = other DNA

SEQ ID NO: 52106 - DNA, 49 bp, synthetic construct; identical to SEQ ID NO: 2462
  misc_feature 1..49: note = Probe
  source 1..49: mol_type = other DNA

SEQ ID NO: 52107 - DNA, 50 bp, synthetic construct; identical to SEQ ID NO: 101
  misc_feature 1..50: note = Probe
  source 1..50: mol_type = other DNA

SEQ ID NO: 52108 - DNA, 30 bp, synthetic construct; identical to SEQ ID NO: 106
  misc_feature 1..30: note = Probe
  source 1..30: mol_type = other DNA

SEQ ID NO: 52109 - DNA, 38 bp, synthetic construct; identical to SEQ ID NO: 2479
  misc_feature 1..38: note = Probe
  source 1..38: mol_type = other DNA

SEQ ID NO: 52110 - DNA, 39 bp, synthetic construct; identical to SEQ ID NO: 2480
  misc_feature 1..39: note = Probe
  source 1..39: mol_type = other DNA

SEQ ID NO: 52111 - DNA, 45 bp, synthetic construct; identical to SEQ ID NO: 2484
  misc_feature 1..45: note = Probe
  source 1..45: mol_type = other DNA

SEQ ID NO: 52112 - DNA, 25 bp, synthetic construct
  misc_feature 1..25: note = Probe
  source 1..25: mol_type = other DNA
aatgccccaactaaatactaccgta

SEQ ID NO: 52113 - DNA, 29 bp, synthetic construct
  misc_feature 1..29: note = Probe
  source 1..29: mol_type = other DNA
aatgccccaactaaatactaccgtatggc

SEQ ID NO: 52114 - DNA, 17 bp, synthetic construct
  misc_feature 1..17: note = Probe
  source 1..17: mol_type = other DNA
aatggttagcactctgg

SEQ ID NO: 52115 - DNA, 18 bp, synthetic construct
  misc_feature 1..18: note = Probe
  source 1..18: mol_type = other DNA
aatggttagcactctgga

SEQ ID NO: 52116 - DNA, 38 bp, synthetic construct; identical to SEQ ID NO: 2503
  misc_feature 1..38: note = Probe
  source 1..38: mol_type = other DNA

SEQ ID NO: 52117 - DNA, 50 bp, synthetic construct; identical to SEQ ID NO: 113
  misc_feature 1..50: note = Probe
  source 1..50: mol_type = other DNA

SEQ ID NO: 52118 - DNA, 38 bp, synthetic construct; identical to SEQ ID NO: 2508
  misc_feature 1..38: note = Probe
  source 1..38: mol_type = other DNA

SEQ ID NO: 52119 - DNA, 16 bp, synthetic construct
  misc_feature 1..16: note = Probe
  source 1..16: mol_type = other DNA
aattctcgcctgccac

SEQ ID NO: 52120 - DNA, 27 bp, synthetic construct
  misc_feature 1..27: note = Probe
  source 1..27: mol_type = other DNA
aattctcgcctgccacgcgggaggccc

SEQ ID NO: 52121 - DNA, 31 bp, synthetic construct; identical to SEQ ID NO: 15317
  misc_feature 1..31: note = Probe
  source 1..31: mol_type = other DNA

SEQ ID NO: 52122 - DNA, 44 bp, synthetic construct; identical to SEQ ID NO: 2520
  misc_feature 1..44: note = Probe
  source 1..44: mol_type = other DNA

SEQ ID NO: 52123 - DNA, 45 bp, synthetic construct; identical to SEQ ID NO: 2521
  misc_feature 1..45: note = Probe
  source 1..45: mol_type = other DNA

SEQ ID NO: 52124 - DNA, 50 bp, synthetic construct; identical to SEQ ID NO: 2525
  misc_feature 1..50: note = Probe
  source 1..50: mol_type = other DNA

SEQ ID NO: 52125 - DNA, 15 bp, synthetic construct
  misc_feature 1..15: note = Probe
  source 1..15: mol_type = other DNA
acaacagaggcttac

SEQ ID NO: 52126 - DNA, 16 bp, synthetic construct
  misc_feature 1..16: note = Probe
  source 1..16: mol_type = other DNA
acaacagaggcttacg

SEQ ID NO: 52127 - DNA, 17 bp, synthetic construct
  misc_feature 1..17: note = Probe
  source 1..17: mol_type = other DNA
acaacagaggcttacga

SEQ ID NO: 52128 - DNA, 18 bp, synthetic construct
  misc_feature 1..18: note = Probe
  source 1..18: mol_type = other DNA
acaacagaggcttacgac

SEQ ID NO: 52129 - DNA, 19 bp, synthetic construct
  misc_feature 1..19: note = Probe
  source 1..19: mol_type = other DNA
acaacagaggcttacgacc

SEQ ID NO: 52130 - DNA, 20 bp, synthetic construct
  misc_feature 1..20: note = Probe
  source 1..20: mol_type = other DNA
acaacagaggcttacgaccc

SEQ ID NO: 52131 - DNA, 21 bp, synthetic construct
  misc_feature 1..21: note = Probe
  source 1..21: mol_type = other DNA
acaacagaggcttacgacccc

SEQ ID NO: 52132 - DNA, 22 bp, synthetic construct
  misc_feature 1..22: note = Probe
  source 1..22: mol_type = other DNA
acaacagaggcttacgacccct

SEQ ID NO: 52133 - DNA, 23 bp, synthetic construct
  misc_feature 1..23: note = Probe
  source 1..23: mol_type = other DNA
acaacagaggcttacgacccctt

SEQ ID NO: 52134 - DNA, 24 bp, synthetic construct
  misc_feature 1..24: note = Probe
  source 1..24: mol_type = other DNA
acaacagaggcttacgacccctta

SEQ ID NO: 52135 - DNA, 25 bp, synthetic construct
  misc_feature 1..25: note = Probe
  source 1..25: mol_type = other DNA
acaacagaggcttacgaccccttat

SEQ ID NO: 52136 - DNA, 26 bp, synthetic construct
  misc_feature 1..26: note = Probe
  source 1..26: mol_type = other DNA
acaacagaggcttacgaccccttatt

SEQ ID NO: 52137 - DNA, 27 bp, synthetic construct
  misc_feature 1..27: note = Probe
  source 1..27: mol_type = other DNA
acaacagaggcttacgaccccttattt

SEQ ID NO: 52138 - DNA, 28 bp, synthetic construct
  misc_feature 1..28: note = Probe
  source 1..28: mol_type = other DNA
acaacagaggcttacgaccccttattta

SEQ ID NO: 52139 - DNA, 29 bp, synthetic construct
  misc_feature 1..29: note = Probe
  source 1..29: mol_type = other DNA
acaacagaggcttacgaccccttatttac

SEQ ID NO: 52140 - DNA, 30 bp, synthetic construct; identical to SEQ ID NO: 2562
  misc_feature 1..30: note = Probe
  source 1..30: mol_type = other DNA

SEQ ID NO: 52141 - DNA, 31 bp, synthetic construct; identical to SEQ ID NO: 2563
  misc_feature 1..31: note = Probe
  source 1..31: mol_type = other DNA

SEQ ID NO: 52142 - DNA, 32 bp, synthetic construct; identical to SEQ ID NO: 2564
  misc_feature 1..32: note = Probe
  source 1..32: mol_type = other DNA

SEQ ID NO: 52143 - DNA, 33 bp, synthetic construct; identical to SEQ ID NO: 2565
  misc_feature 1..33: note = Probe
  source 1..33: mol_type = other DNA

SEQ ID NO: 52144 - DNA, 34 bp, synthetic construct; identical to SEQ ID NO: 2566
  misc_feature 1..34: note = Probe
  source 1..34: mol_type = other DNA

SEQ ID NO: 52145 - DNA, 35 bp, synthetic construct; identical to SEQ ID NO: 2567
  misc_feature 1..35: note = Probe
  source 1..35: mol_type = other DNA

SEQ ID NO: 52146 - DNA, 36 bp, synthetic construct; identical to SEQ ID NO: 2568
  misc_feature 1..36: note = Probe
  source 1..36: mol_type = other DNA

SEQ ID NO: 52147 - DNA, 20 bp, synthetic construct
  misc_feature 1..20: note = Probe
  source 1..20: mol_type = other DNA
acaagaactgctaactcatg

SEQ ID NO: 52148 - DNA, 26 bp, synthetic construct
  misc_feature 1..26: note = Probe
  source 1..26: mol_type = other DNA
acaagaactgctaactcatgccccca

SEQ ID NO: 52149 - DNA, 29 bp, synthetic construct
  misc_feature 1..29: note = Probe
  source 1..29: mol_type = other DNA
acaagaactgctaactcatgcccccatgt

SEQ ID NO: 52150 - DNA, 32 bp, synthetic construct; identical to SEQ ID NO: 2585
  misc_feature 1..32: note = Probe
  source 1..32: mol_type = other DNA

SEQ ID NO: 52151 - DNA, 43 bp, synthetic construct; identical to SEQ ID NO: 119
  misc_feature 1..43: note = Probe
  source 1..43: mol_type = other DNA

SEQ ID NO: 52152 - DNA, 44 bp, synthetic construct; identical to SEQ ID NO: 120
  misc_feature 1..44: note = Probe
  source 1..44: mol_type = other DNA

SEQ ID NO: 52153 - DNA, 45 bp, synthetic construct; identical to SEQ ID NO: 121
  misc_feature 1..45: note = Probe
  source 1..45: mol_type = other DNA

SEQ ID NO: 52154 - DNA, 46 bp, synthetic construct; identical to SEQ ID NO: 122
  misc_feature 1..46: note = Probe
  source 1..46: mol_type = other DNA

SEQ ID NO: 52155 - DNA, 50 bp, synthetic construct; identical to SEQ ID NO: 2588
  misc_feature 1..50: note = Probe
  source 1..50: mol_type = other DNA

SEQ ID NO: 52156 - DNA, 25 bp, synthetic construct
  misc_feature 1..25: note = Probe
  source 1..25: mol_type = other DNA
acacaaagcacccaacttacactta

SEQ ID NO: 52157 - DNA, 30 bp, synthetic construct
  misc_feature 1..30: note = Probe
  source 1..30: mol_type = other DNA
acacaaagcacccaacttacacttaggaga

SEQ ID NO: 52158 - DNA, 50 bp, synthetic construct; identical to SEQ ID NO: 2603
  misc_feature 1..50: note = Probe
  source 1..50: mol_type = other DNA

SEQ ID NO: 52159 - DNA, 24 bp, synthetic construct
  misc_feature 1..24: note = Probe
  source 1..24: mol_type = other DNA
acacccacccaagaacagggtttg

SEQ ID NO: 52160 - DNA, 25 bp, synthetic construct
  misc_feature 1..25: note = Probe
  source 1..25: mol_type = other DNA
acacccacccaagaacagggtttgt

SEQ ID NO: 52161 - DNA, 26 bp, synthetic construct
  misc_feature 1..26: note = Probe
  source 1..26: mol_type = other DNA
acacccacccaagaacagggtttgtt

SEQ ID NO: 52162 - DNA, 27 bp, synthetic construct
  misc_feature 1..27: note = Probe
  source 1..27: mol_type = other DNA
acacccacccaagaacagggtttgtta

SEQ ID NO: 52163 - DNA, 30 bp, synthetic construct; identical to SEQ ID NO: 15394
  misc_feature 1..30: note = Probe
  source 1..30: mol_type = other DNA

SEQ ID NO: 52164 - DNA, 20 bp, synthetic construct
  misc_feature 1..20: note = Probe
  source 1..20: mol_type = other DNA
acacctctttacagtgaaat

SEQ ID NO: 52165 - DNA, 25 bp, synthetic construct
  misc_feature 1..25: note = Probe
  source 1..25: mol_type = other DNA
acacgcagaaggtcctgggttcgag

SEQ ID NO: 52166 - DNA, 41 bp, synthetic construct; identical to SEQ ID NO: 15408
  misc_feature 1..41: note = Probe
  source 1..41: mol_type = other DNA

SEQ ID NO: 52167 - DNA, 42 bp, synthetic construct; identical to SEQ ID NO: 2613
  misc_feature 1..42: note = Probe
  source 1..42: mol_type = other DNA

SEQ ID NO: 52168 - DNA, 44 bp, synthetic construct; identical to SEQ ID NO: 44427
  misc_feature 1..44: note = Probe
  source 1..44: mol_type = other DNA

SEQ ID NO: 52169 - DNA, 45 bp, synthetic construct; identical to SEQ ID NO: 44428
  misc_feature 1..45: note = Probe
  source 1..45: mol_type = other DNA

SEQ ID NO: 52170 - DNA, 16 bp, synthetic construct
  misc_feature 1..16: note = Probe
  source 1..16: mol_type = other DNA
acacgcgaaaggtccc

SEQ ID NO: 52171 - DNA, 39 bp, synthetic construct
  misc_feature 1..39: note = Probe
  source 1..39: mol_type = other DNA
acacgcgaaaggtccccggttcgaaaccgggcagaagca

SEQ ID NO: 52172 - DNA, 41 bp, synthetic construct
  misc_feature 1..41: note = Probe
  source 1..41: mol_type = other DNA
acacgcgaaaggtccccggttcgaaaccgggcagaagcaac

SEQ ID NO: 52173 - DNA, 42 bp, synthetic construct
  misc_feature 1..42: note = Probe
  source 1..42: mol_type = other DNA
acacgcgaaaggtccccggttcgaaaccgggcagaagcaacc

SEQ ID NO: 52174 - DNA, 36 bp, synthetic construct; identical to SEQ ID NO: 12531
  misc_feature 1..36: note = Probe
  source 1..36: mol_type = other DNA

SEQ ID NO: 52175 - DNA, 37 bp, synthetic construct; identical to SEQ ID NO: 37792
  misc_feature 1..37: note = Probe
  source 1..37: mol_type = other DNA

SEQ ID NO: 52176 - DNA, 38 bp, synthetic construct
  misc_feature 1..38: note = Probe
  source 1..38: mol_type = other DNA
acacgcgaaaggtccccggttcgaaaccgggcggaaac

SEQ ID NO: 52177 - DNA, 41 bp, synthetic construct
  misc_feature 1..41: note = Probe
  source 1..41: mol_type = other DNA
acacgcgaaaggtccccggttcgaaaccgggcggaaacaca

SEQ ID NO: 52178 - DNA, 42 bp, synthetic construct; identical to SEQ ID NO: 15415
  misc_feature 1..42: note = Probe
  source 1..42: mol_type = other DNA

SEQ ID NO: 52179 - DNA, 41 bp, synthetic construct
  misc_feature 1..41: note = Probe
  source 1..41: mol_type = other DNA
acacgcgaaaggtccccggttcgaaaccgggcggaaacacg

SEQ ID NO: 52180 - DNA, 35 bp, synthetic construct
  misc_feature 1..35: note = Probe
  source 1..35: mol_type = other DNA
acacgcgaaaggtccccggttcgatcccgggcgga

SEQ ID NO: 52181 - DNA, 36 bp, synthetic construct; identical to SEQ ID NO: 37793
  misc_feature 1..36: note = Probe
  source 1..36: mol_type = other DNA

SEQ ID NO: 52182 - DNA, 41 bp, synthetic construct; identical to SEQ ID NO: 44437
  misc_feature 1..41: note = Probe
  source 1..41: mol_type = other DNA

SEQ ID NO: 52183 - DNA, 42 bp, synthetic construct; identical to SEQ ID NO: 37794
  misc_feature 1..42: note = Probe
  source 1..42: mol_type = other DNA

SEQ ID NO: 52184 - DNA, 22 bp, synthetic construct
  misc_feature 1..22: note = Probe
  source 1..22: mol_type = other DNA
acacgcgaaaggtccccggttt

SEQ ID NO: 52185 - DNA, 25 bp, synthetic construct
  misc_feature 1..25: note = Probe
  source 1..25: mol_type = other DNA
acacgtacacgtcccttcgatagct

SEQ ID NO: 52186 - DNA, 26 bp, synthetic construct
  misc_feature 1..26: note = Probe
  source 1..26: mol_type = other DNA
acacgtacacgtcccttcgatagctc

SEQ ID NO: 52187 - DNA, 45 bp, synthetic construct; identical to SEQ ID NO: 2619
  misc_feature 1..45: note = Probe
  source 1..45: mol_type = other DNA

SEQ ID NO: 52188 - DNA, 46 bp, synthetic construct; identical to SEQ ID NO: 2620
  misc_feature 1..46: note = Probe
  source 1..46: mol_type = other DNA

SEQ ID NO: 52189 - DNA, 31 bp, synthetic construct; identical to SEQ ID NO: 2625
  misc_feature 1..31: note = Probe
  source 1..31: mol_type = other DNA

SEQ ID NO: 52190 - DNA, 38 bp, synthetic construct; identical to SEQ ID NO: 2630
  misc_feature 1..38: note = Probe
  source 1..38: mol_type = other DNA

SEQ ID NO: 52191 - DNA, 39 bp, synthetic construct; identical to SEQ ID NO: 2631
  misc_feature 1..39: note = Probe
  source 1..39: mol_type = other DNA

SEQ ID NO: 52192 - DNA, 40 bp, synthetic construct; identical to SEQ ID NO: 2632
  misc_feature 1..40: note = Probe
  source 1..40: mol_type = other DNA

SEQ ID NO: 52193 - DNA, 41 bp, synthetic construct; identical to SEQ ID NO: 2633
  misc_feature 1..41: note = Probe
  source 1..41: mol_type = other DNA

SEQ ID NO: 52194 - DNA, 17 bp, synthetic construct
  misc_feature 1..17: note = Probe
  source 1..17: mol_type = other DNA
acagaccaagagccttc

SEQ ID NO: 52195 - DNA, 30 bp, synthetic construct; identical to SEQ ID NO: 2640
  misc_feature 1..30: note = Probe
  source 1..30: mol_type = other DNA

SEQ ID NO: 52196 - DNA, 16 bp, synthetic construct
  misc_feature 1..16: note = Probe
  source 1..16: mol_type = other DNA
acagctatccattggt

SEQ ID NO: 52197 - DNA, 49 bp, synthetic construct; identical to SEQ ID NO: 2643
  misc_feature 1..49: note = Probe
  source 1..49: mol_type = other DNA

SEQ ID NO: 52198 - DNA, 50 bp, synthetic construct; identical to SEQ ID NO: 2644
  misc_feature 1..50: note = Probe
  source 1..50: mol_type = other DNA

SEQ ID NO: 52199 - DNA, 21 bp, synthetic construct
  misc_feature 1..21: note = Probe
  source 1..21: mol_type = other DNA
acagtcagaggttcaattcct

SEQ ID NO: 52200 - DNA, 24 bp, synthetic construct
  misc_feature 1..24: note = Probe
  source 1..24: mol_type = other DNA
acagtcagaggttcaattcctctt

SEQ ID NO: 52201 - DNA, 25 bp, synthetic construct
  misc_feature 1..25: note = Probe
  source 1..25: mol_type = other DNA
acagtcagaggttcaattcctcttc

SEQ ID NO: 52202 - DNA, 26 bp, synthetic construct
  misc_feature 1..26: note = Probe
  source 1..26: mol_type = other DNA
acagtcagaggttcaattcctcttct

SEQ ID NO: 52203 - DNA, 27 bp, synthetic construct
  misc_feature 1..27: note = Probe
  source 1..27: mol_type = other DNA
acagtcagaggttcaattcctcttctt

SEQ ID NO: 52204 - DNA, 28 bp, synthetic construct
  misc_feature 1..28: note = Probe
  source 1..28: mol_type = other DNA
acagtcagaggttcaattcctcttctta

SEQ ID NO: 52205 - DNA, 29 bp, synthetic construct
  misc_feature 1..29: note = Probe
  source 1..29: mol_type = other DNA
acagtcagaggttcaattcctcttcttaa

SEQ ID NO: 52206 - DNA, 30 bp, synthetic construct; identical to SEQ ID NO: 15478
  misc_feature 1..30: note = Probe
  source 1..30: mol_type = other DNA

SEQ ID NO: 52207 - DNA, 31 bp, synthetic construct; identical to SEQ ID NO: 2654
  misc_feature 1..31: note = Probe
  source 1..31: mol_type = other DNA

SEQ ID NO: 52208 - DNA, 32 bp, synthetic construct; identical to SEQ ID NO: 15480
  misc_feature 1..32: note = Probe
  source 1..32: mol_type = other DNA

SEQ ID NO: 52209 - DNA, 34 bp, synthetic construct; identical to SEQ ID NO: 2656
  misc_feature 1..34: note = Probe
  source 1..34: mol_type = other DNA

SEQ ID NO: 52210 - DNA, 30 bp, synthetic construct; identical to SEQ ID NO: 2668
  misc_feature 1..30: note = Probe
  source 1..30: mol_type = other DNA

SEQ ID NO: 52211 - DNA, 50 bp, synthetic construct; identical to SEQ ID NO: 2685
  misc_feature 1..50: note = Probe
  source 1..50: mol_type = other DNA

SEQ ID NO: 52212 - DNA, 26 bp, synthetic construct
  misc_feature 1..26: note = Probe
  source 1..26: mol_type = other DNA
acatggtctagcggttaggattcctg

SEQ ID NO: 52213 - DNA, 27 bp, synthetic construct
  misc_feature 1..27: note = Probe
  source 1..27: mol_type = other DNA
acatggtctagcggttaggattcctgg

SEQ ID NO: 52214 - DNA, 28 bp, synthetic construct
  misc_feature 1..28: note = Probe
  source 1..28: mol_type = other DNA
accaaaacatcagattgtgaatctgaca

SEQ ID NO: 52215 - DNA, 29 bp, synthetic construct
  misc_feature 1..29: note = Probe
  source 1..29: mol_type = other DNA
accaaaacatcagattgtgaatctgacaa

SEQ ID NO: 52216 - DNA, 31 bp, synthetic construct; identical to SEQ ID NO: 2695
  misc_feature 1..31: note = Probe
  source 1..31: mol_type = other DNA

SEQ ID NO: 52217 - DNA, 32 bp, synthetic construct; identical to SEQ ID NO: 15519
  misc_feature 1..32: note = Probe
  source 1..32: mol_type = other DNA

SEQ ID NO: 52218 - DNA, 33 bp, synthetic construct; identical to SEQ ID NO: 15520
  misc_feature 1..33: note = Probe
  source 1..33: mol_type = other DNA

SEQ ID NO: 52219 - DNA, 37 bp, synthetic construct; identical to SEQ ID NO: 2697
  misc_feature 1..37: note = Probe
  source 1..37: mol_type = other DNA

SEQ ID NO: 52220 - DNA, 24 bp, synthetic construct
  misc_feature 1..24: note = Probe
  source 1..24: mol_type = other DNA
accaacacctctttacagtgaaat

SEQ ID NO: 52221 - DNA, 25 bp, synthetic construct
  misc_feature 1..25: note = Probe
  source 1..25: mol_type = other DNA
accaacacctctttacagtgaaatg

SEQ ID NO: 52222 - DNA, 18 bp, synthetic construct
  misc_feature 1..18: note = Probe
  source 1..18: mol_type = other DNA
accagaatggccgagtgg

SEQ ID NO: 52223 - DNA, 35 bp, synthetic construct; identical to SEQ ID NO: 2717
  misc_feature 1..35: note = Probe
  source 1..35: mol_type = other DNA

SEQ ID NO: 52224 - DNA, 36 bp, synthetic construct; identical to SEQ ID NO: 2718
  misc_feature 1..36: note = Probe
  source 1..36: mol_type = other DNA

SEQ ID NO: 52225 - DNA, 37 bp, synthetic construct; identical to SEQ ID NO: 2719
  misc_feature 1..37: note = Probe
  source 1..37: mol_type = other DNA

SEQ ID NO: 52226 - DNA, 38 bp, synthetic construct; identical to SEQ ID NO: 2720
  misc_feature 1..38: note = Probe
  source 1..38: mol_type = other DNA

SEQ ID NO: 52227 - DNA, 18 bp, synthetic construct
  misc_feature 1..18: note = Probe
  source 1..18: mol_type = other DNA
accaggatggccgagtgg

SEQ ID NO: 52228 - DNA, 19 bp, synthetic construct
  misc_feature 1..19: note = Probe
  source 1..19: mol_type = other DNA
accaggatggccgagtggt

SEQ ID NO: 52229 - DNA, 20 bp, synthetic construct
  misc_feature 1..20: note = Probe
  source 1..20: mol_type = other DNA
accaggatggccgagtggtt

SEQ ID NO: 52230 - DNA, 21 bp, synthetic construct
  misc_feature 1..21: note = Probe
  source 1..21: mol_type = other DNA
accaggatggccgagtggtta

SEQ ID NO: 52231 - DNA, 22 bp, synthetic construct
  misc_feature 1..22: note = Probe
  source 1..22: mol_type = other DNA
accaggatggccgagtggttaa

SEQ ID NO: 52232 - DNA, 23 bp, synthetic construct
  misc_feature 1..23: note = Probe
  source 1..23: mol_type = other DNA
accaggatggccgagtggttaag

SEQ ID NO: 52233 - DNA, 46 bp, synthetic construct; identical to SEQ ID NO: 2729
  misc_feature 1..46: note = Probe
  source 1..46: mol_type = other DNA

SEQ ID NO: 52234 - DNA, 42 bp, synthetic construct; identical to SEQ ID NO: 2744
  misc_feature 1..42: note = Probe
  source 1..42: mol_type = other DNA

SEQ ID NO: 52235 - DNA, 50 bp, synthetic construct; identical to SEQ ID NO: 2749
  misc_feature 1..50: note = Probe
  source 1..50: mol_type = other DNA

SEQ ID NO: 52236 - DNA, 18 bp, synthetic construct
  misc_feature 1..18: note = Probe
  source 1..18: mol_type = other DNA
acccaagaacagggtttg

SEQ ID NO: 52237 - DNA, 21 bp, synthetic construct
  misc_feature 1..21: note = Probe
  source 1..21: mol_type = other DNA
acccaagaacagggtttgtta

SEQ ID NO: 52238 - DNA, 24 bp, synthetic construct
  misc_feature 1..24: note = Probe
  source 1..24: mol_type = other DNA
acccaagaacagggtttgttaaga

SEQ ID NO: 52239 - DNA, 28 bp, synthetic construct
  misc_feature 1..28: note = Probe
  source 1..28: mol_type = other DNA
acccacacccacccaagaacagggtttg

SEQ ID NO: 52240 - DNA, 29 bp, synthetic construct
  misc_feature 1..29: note = Probe
  source 1..29: mol_type = other DNA
acccacacccacccaagaacagggtttgt

SEQ ID NO: 52241 - DNA, 30 bp, synthetic construct; identical to SEQ ID NO: 15572
  misc_feature 1..30: note = Probe
  source 1..30: mol_type = other DNA

SEQ ID NO: 52242 - DNA, 31 bp, synthetic construct; identical to SEQ ID NO: 2755
  misc_feature 1..31: note = Probe
  source 1..31: mol_type = other DNA

SEQ ID NO: 52243 - DNA, 22 bp, synthetic construct
  misc_feature 1..22: note = Probe
  source 1..22: mol_type = other DNA
acccacccaagaacagggtttg

SEQ ID NO: 52244 - DNA, 24 bp, synthetic construct
  misc_feature 1..24: note = Probe
  source 1..24: mol_type = other DNA
acccacccaagaacagggtttgtt

SEQ ID NO: 52245 - DNA, 25 bp, synthetic construct
  misc_feature 1..25: note = Probe
  source 1..25: mol_type = other DNA
acccacccaagaacagggtttgtta

SEQ ID NO: 52246 - DNA, 39 bp, synthetic construct; identical to SEQ ID NO: 2760
  misc_feature 1..39: note = Probe
  source 1..39: mol_type = other DNA

SEQ ID NO: 52247 - DNA, 29 bp, synthetic construct
  misc_feature 1..29: note = Probe
  source 1..29: mol_type = other DNA
accccgaaaatgttggttatacccttccc

SEQ ID NO: 52248 - DNA, 30 bp, synthetic construct; identical to SEQ ID NO: 2769
  misc_feature 1..30: note = Probe
  source 1..30: mol_type = other DNA

SEQ ID NO: 52249 - DNA, 31 bp, synthetic construct; identical to SEQ ID NO: 2770
  misc_feature 1..31: note = Probe
  source 1..31: mol_type = other DNA

SEQ ID NO: 52250 - DNA, 32 bp, synthetic construct; identical to SEQ ID NO: 153
  misc_feature 1..32: note = Probe
  source 1..32: mol_type = other DNA

SEQ ID NO: 52251 - DNA, 33 bp, synthetic construct; identical to SEQ ID NO: 154
  misc_feature 1..33: note = Probe
  source 1..33: mol_type = other DNA

SEQ ID NO: 52252 - DNA, 34 bp, synthetic construct; identical to SEQ ID NO: 155
  misc_feature 1..34: note = Probe
  source 1..34: mol_type = other DNA

SEQ ID NO: 52253 - DNA, 35 bp, synthetic construct; identical to SEQ ID NO: 156
  misc_feature 1..35: note = Probe
  source 1..35: mol_type = other DNA

SEQ ID NO: 52254 - DNA, 38 bp, synthetic construct; identical to SEQ ID NO: 2773
  misc_feature 1..38: note = Probe
  source 1..38: mol_type = other DNA

SEQ ID NO: 52255 - DNA, 21 bp, synthetic construct
  misc_feature 1..21: note = Probe
  source 1..21: mol_type = other DNA
accctgtggtctagtggttag

SEQ ID NO: 52256 - DNA, 22 bp, synthetic construct
  misc_feature 1..22: note = Probe
  source 1..22: mol_type = other DNA
accctgtggtctagtggttagg

SEQ ID NO: 52257 - DNA, 23 bp, synthetic construct
  misc_feature 1..23: note = Probe
  source 1..23: mol_type = other DNA
accctgtggtctagtggttagga

SEQ ID NO: 52258 - DNA, 34 bp, synthetic construct; identical to SEQ ID NO: 157
  misc_feature 1..34: note = Probe
  source 1..34: mol_type = other DNA

SEQ ID NO: 52259 - DNA, 39 bp, synthetic construct; identical to SEQ ID NO: 2797
  misc_feature 1..39: note = Probe
  source 1..39: mol_type = other DNA

SEQ ID NO: 52260 - DNA, 26 bp, synthetic construct
  misc_feature 1..26: note = Probe
  source 1..26: mol_type = other DNA
accggagatgaaaacctttttccaag

SEQ ID NO: 52261 - DNA, 28 bp, synthetic construct
  misc_feature 1..28: note = Probe
  source 1..28: mol_type = other DNA
accggagatgaaaacctttttccaagga

SEQ ID NO: 52262 - DNA, 29 bp, synthetic construct
  misc_feature 1..29: note = Probe
  source 1..29: mol_type = other DNA
accggagatgaaaacctttttccaaggac

SEQ ID NO: 52263 - DNA, 30 bp, synthetic construct; identical to SEQ ID NO: 165
  misc_feature 1..30: note = Probe
  source 1..30: mol_type = other DNA

SEQ ID NO: 52264 - DNA, 31 bp, synthetic construct; identical to SEQ ID NO: 2802
  misc_feature 1..31: note = Probe
  source 1..31: mol_type = other DNA

SEQ ID NO: 52265 - DNA, 32 bp, synthetic construct; identical to SEQ ID NO: 2803
  misc_feature 1..32: note = Probe
  source 1..32: mol_type = other DNA

SEQ ID NO: 52266 - DNA, 33 bp, synthetic construct; identical to SEQ ID NO: 2804
  misc_feature 1..33: note = Probe
  source 1..33: mol_type = other DNA

SEQ ID NO: 52267 - DNA, 34 bp, synthetic construct; identical to SEQ ID NO: 2805
  misc_feature 1..34: note = Probe
  source 1..34: mol_type = other DNA

SEQ ID NO: 52268 - DNA, 17 bp, synthetic construct
  misc_feature 1..17: note = Probe
  source 1..17: mol_type = other DNA
accgggcggaaacacct

SEQ ID NO: 52269 - DNA, 18 bp, synthetic construct
  misc_feature 1..18: note = Probe
  source 1..18: mol_type = other DNA
accgggcggaaacacctc

SEQ ID NO: 52270 - DNA, 19 bp, synthetic construct
  misc_feature 1..19: note = Probe
  source 1..19: mol_type = other DNA
accgggcggaaacacctcc

SEQ ID NO: 52271 - DNA, 20 bp, synthetic construct
  misc_feature 1..20: note = Probe
  source 1..20: mol_type = other DNA
accgggcggaaacacctcct

SEQ ID NO: 52272 - DNA, 21 bp, synthetic construct
  misc_feature 1..21: note = Probe
  source 1..21: mol_type = other DNA
accgggcggaaacacctcctt

SEQ ID NO: 52273 - DNA, 21 bp, synthetic construct
  misc_feature 1..21: note = Probe
  source 1..21: mol_type = other DNA
accgggcggaaacacgttttt

SEQ ID NO: 52274 - DNA, 30 bp, synthetic construct; identical to SEQ ID NO: 2811
  misc_feature 1..30: note = Probe
  source 1..30: mol_type = other DNA

SEQ ID NO: 52275 - DNA, 50 bp, synthetic construct; identical to SEQ ID NO: 2815
  misc_feature 1..50: note = Probe
  source 1..50: mol_type = other DNA

SEQ ID NO: 52276 - DNA, 25 bp, synthetic construct
  misc_feature 1..25: note = Probe
  source 1..25: mol_type = other DNA
acctagccccaaacccactccacct

SEQ ID NO: 52277 - DNA, 15 bp, synthetic construct
  misc_feature 1..15: note = Probe
  source 1..15: mol_type = other DNA
acctattctcaaact

SEQ ID NO: 52278 - DNA, 16 bp, synthetic construct
  misc_feature 1..16: note = Probe
  source 1..16: mol_type = other DNA
acctattctcaaactt

SEQ ID NO: 52279 - DNA, 17 bp, synthetic construct
  misc_feature 1..17: note = Probe
  source 1..17: mol_type = other DNA
acctattctcaaacttt

SEQ ID NO: 52280 - DNA, 18 bp, synthetic construct
  misc_feature 1..18: note = Probe
  source 1..18: mol_type = other DNA
acctattctcaaacttta

SEQ ID NO: 52281 - DNA, 20 bp, synthetic construct
  misc_feature 1..20: note = Probe
  source 1..20: mol_type = other DNA
acctcagaaggtctcacttt

SEQ ID NO: 52282 - DNA, 21 bp, synthetic construct
  misc_feature 1..21: note = Probe
  source 1..21: mol_type = other DNA
acctcagaaggtctcactttt

SEQ ID NO: 52283 - DNA, 22 bp, synthetic construct
  misc_feature 1..22: note = Probe
  source 1..22: mol_type = other DNA
acctcagaaggtctcacttttc

SEQ ID NO: 52284 - DNA, 15 bp, synthetic construct
  misc_feature 1..15: note = Probe
  source 1..15: mol_type = other DNA
acctcctactcctca

SEQ ID NO: 52285 - DNA, 17 bp, synthetic construct
  misc_feature 1..17: note = Probe
  source 1..17: mol_type = other DNA
acctcctcaaagcaata

SEQ ID NO: 52286 - DNA, 50 bp, synthetic construct; identical to SEQ ID NO: 2840
  misc_feature 1..50: note = Probe
  source 1..50: mol_type = other DNA

SEQ ID NO: 52287 - DNA, 50 bp, synthetic construct; identical to SEQ ID NO: 2841
  misc_feature 1..50: note = Probe
  source 1..50: mol_type = other DNA

SEQ ID NO: 52288 - DNA, 20 bp, synthetic construct
  misc_feature 1..20: note = Probe
  source 1..20: mol_type = other DNA
acgaccccttatttaccgag

SEQ ID NO: 52289 - DNA, 32 bp, synthetic construct; identical to SEQ ID NO: 27268
  misc_feature 1..32: note = Probe
  source 1..32: mol_type = other DNA

SEQ ID NO: 52290 - DNA, 50 bp, synthetic construct; identical to SEQ ID NO: 2843
  misc_feature 1..50: note = Probe
  source 1..50: mol_type = other DNA

SEQ ID NO: 52291 - DNA, 40 bp, synthetic construct; identical to SEQ ID NO: 2846
  misc_feature 1..40: note = Probe
  source 1..40: mol_type = other DNA

SEQ ID NO: 52292 - DNA, 19 bp, synthetic construct
  misc_feature 1..19: note = Probe
  source 1..19: mol_type = other DNA
acgcgaaaggtccccggtt

SEQ ID NO: 52293 - DNA, 19 bp, synthetic construct
  misc_feature 1..19: note = Probe
  source 1..19: mol_type = other DNA
acgcgggagaccggggttc

SEQ ID NO: 52294 - DNA, 20 bp, synthetic construct
  misc_feature 1..20: note = Probe
  source 1..20: mol_type = other DNA
acgcgggagaccggggttca

SEQ ID NO: 52295 - DNA, 21 bp, synthetic construct
  misc_feature 1..21: note = Probe
  source 1..21: mol_type = other DNA
acgcgggagaccggggttcaa

SEQ ID NO: 52296 - DNA, 39 bp, synthetic construct; identical to SEQ ID NO: 2861
  misc_feature 1..39: note = Probe
  source 1..39: mol_type = other DNA

SEQ ID NO: 52297 - DNA, 20 bp, synthetic construct
  misc_feature 1..20: note = Probe
  source 1..20: mol_type = other DNA
acgcgggagaccggggttcg

SEQ ID NO: 52298 - DNA, 39 bp, synthetic construct; identical to SEQ ID NO: 2874
  misc_feature 1..39: note = Probe
  source 1..39: mol_type = other DNA

SEQ ID NO: 52299 - DNA, 39 bp, synthetic construct; identical to SEQ ID NO: 2877
  misc_feature 1..39: note = Probe
  source 1..39: mol_type = other DNA

SEQ ID NO: 52300 - DNA, 19 bp, synthetic construct
  misc_feature 1..19: note = Probe
  source 1..19: mol_type = other DNA
acgcgggaggcccgggttc

SEQ ID NO: 52301 - DNA, 20 bp, synthetic construct
  misc_feature 1..20: note = Probe
  source 1..20: mol_type = other DNA
acgcgggaggcccgggttcg

SEQ ID NO: 52302 - DNA, 20 bp, synthetic construct
  misc_feature 1..20: note = Probe
  source 1..20: mol_type = other DNA
acgcgggaggcccgggtttg

SEQ ID NO: 52303 - DNA, 21 bp, synthetic construct
  misc_feature 1..21: note = Probe
  source 1..21: mol_type = other DNA
acggatcagaagattccaggt

SEQ ID NO: 52304 - DNA, 22 bp, synthetic construct
  misc_feature 1..22: note = Probe
  source 1..22: mol_type = other DNA
acggatcagaagattccaggtt

SEQ ID NO: 52305 - DNA, 21 bp, synthetic construct
  misc_feature 1..21: note = Probe
  source 1..21: mol_type = other DNA
acggatcagaagattctaggt

SEQ ID NO: 52306 - DNA, 22 bp, synthetic construct
  misc_feature 1..22: note = Probe
  source 1..22: mol_type = other DNA
acggatcagaagattctaggtt

SEQ ID NO: 52307 - DNA, 28 bp, synthetic construct
  misc_feature 1..28: note = Probe
  source 1..28: mol_type = other DNA
acgggctcacatcaccccataaacaaat

SEQ ID NO: 52308 - DNA, 16 bp, synthetic construct
  misc_feature 1..16: note = Probe
  source 1..16: mol_type = other DNA
acggtagcgcgtctga

SEQ ID NO: 52309 - DNA, 31 bp, synthetic construct; identical to SEQ ID NO: 15898
  misc_feature 1..31: note = Probe
  source 1..31: mol_type = other DNA

SEQ ID NO: 52310 - DNA, 19 bp, synthetic construct
  misc_feature 1..19: note = Probe
  source 1..19: mol_type = other DNA
actaagtgtttgtgggttt

SEQ ID NO: 52311 - DNA, 38 bp, synthetic construct; identical to SEQ ID NO: 2896
  misc_feature 1..38: note = Probe
  source 1..38: mol_type = other DNA

SEQ ID NO: 52312 - DNA, 39 bp, synthetic construct; identical to SEQ ID NO: 2897
  misc_feature 1..39: note = Probe
  source 1..39: mol_type = other DNA

SEQ ID NO: 52313 - DNA, 40 bp, synthetic construct; identical to SEQ ID NO: 2898
  misc_feature 1..40: note = Probe
  source 1..40: mol_type = other DNA

SEQ ID NO: 52314 - DNA, 41 bp, synthetic construct; identical to SEQ ID NO: 2899
  misc_feature 1..41: note = Probe
  source 1..41: mol_type = other DNA

SEQ ID NO: 52315 - DNA, 50 bp, synthetic construct; identical to SEQ ID NO: 2901
  misc_feature 1..50: note = Probe
  source 1..50: mol_type = other DNA

SEQ ID NO: 52316 - DNA, 24 bp, synthetic construct
  misc_feature 1..24: note = Probe
  source 1..24: mol_type = other DNA
actacggatcagaagattccaggt

SEQ ID NO: 52317 - DNA, 25 bp, synthetic construct
  misc_feature 1..25: note = Probe
  source 1..25: mol_type = other DNA
actacggatcagaagattccaggtt

SEQ ID NO: 52318 - DNA, 25 bp, synthetic construct
  misc_feature 1..25: note = Probe
  source 1..25: mol_type = other DNA
actacggatcagaagattctaggtt

SEQ ID NO: 52319 - DNA, 19 bp, synthetic construct
  misc_feature 1..19: note = Probe
  source 1..19: mol_type = other DNA
actcatgcccccatgtcta

SEQ ID NO: 52320 - DNA, 25 bp, synthetic construct
  misc_feature 1..25: note = Probe
  source 1..25: mol_type = other DNA
actcatgcccccatgtctaacaaca

SEQ ID NO: 52321 - DNA, 30 bp, synthetic construct; identical to SEQ ID NO: 2906
  misc_feature 1..30: note = Probe
  source 1..30: mol_type = other DNA

SEQ ID NO: 52322 - DNA, 31 bp, synthetic construct; identical to SEQ ID NO: 2907
  misc_feature 1..31: note = Probe
  source 1..31: mol_type = other DNA

SEQ ID NO: 52323 - DNA, 32 bp, synthetic construct; identical to SEQ ID NO: 2908
  misc_feature 1..32: note = Probe
  source 1..32: mol_type = other DNA

SEQ ID NO: 52324 - DNA, 33 bp, synthetic construct; identical to SEQ ID NO: 2909
  misc_feature 1..33: note = Probe
  source 1..33: mol_type = other DNA

SEQ ID NO: 52325 - DNA, 34 bp, synthetic construct; identical to SEQ ID NO: 2910
  misc_feature 1..34: note = Probe
  source 1..34: mol_type = other DNA

SEQ ID NO: 52326 - DNA, 35 bp, synthetic construct; identical to SEQ ID NO: 2911
  misc_feature 1..35: note = Probe
  source 1..35: mol_type = other DNA

SEQ ID NO: 52327 - DNA, 36 bp, synthetic construct; identical to SEQ ID NO: 2912
  misc_feature 1..36: note = Probe
  source 1..36: mol_type = other DNA

SEQ ID NO: 52328 - DNA, 37 bp, synthetic construct; identical to SEQ ID NO: 2913
  misc_feature 1..37: note = Probe
  source 1..37: mol_type = other DNA

SEQ ID NO: 52329 - DNA, 38 bp, synthetic construct; identical to SEQ ID NO: 2914
  misc_feature 1..38: note = Probe
  source 1..38: mol_type = other DNA

SEQ ID NO: 52330 - DNA, 39 bp, synthetic construct; identical to SEQ ID NO: 2915
  misc_feature 1..39: note = Probe
  source 1..39: mol_type = other DNA

SEQ ID NO: 52331 - DNA, 40 bp, synthetic construct; identical to SEQ ID NO: 15933
  misc_feature 1..40: note = Probe
  source 1..40: mol_type = other DNA

SEQ ID NO: 52332 - DNA, 35 bp, synthetic construct; identical to SEQ ID NO: 2917
  misc_feature 1..35: note = Probe
  source 1..35: mol_type = other DNA

SEQ ID NO: 52333 - DNA, 19 bp, synthetic construct
  misc_feature 1..19: note = Probe
  source 1..19: mol_type = other DNA
actcccggtatgggaacaa

SEQ ID NO: 52334 - DNA, 17 bp, synthetic construct
  misc_feature 1..17: note = Probe
  source 1..17: mol_type = other DNA
actcccggtgtgggaac

SEQ ID NO: 52335 - DNA, 18 bp, synthetic construct
  misc_feature 1..18: note = Probe
  source 1..18: mol_type = other DNA
actcccggtgtgggaacg

SEQ ID NO: 52336 - DNA, 19 bp, synthetic construct
  misc_feature 1..19: note = Probe
  source 1..19: mol_type = other DNA
actcccggtgtgggaacgc

SEQ ID NO: 52337 - DNA, 16 bp, synthetic construct
  misc_feature 1..16: note = Probe
  source 1..16: mol_type = other DNA
actctgaatccagcga

SEQ ID NO: 52338 - DNA, 19 bp, synthetic construct
  misc_feature 1..19: note = Probe
  source 1..19: mol_type = other DNA
actctgaatccagcgatcc

SEQ ID NO: 52339 - DNA, 20 bp, synthetic construct
  misc_feature 1..20: note = Probe
  source 1..20: mol_type = other DNA
actctgaatccagcgatccg

SEQ ID NO: 52340 - DNA, 21 bp, synthetic construct
  misc_feature 1..21: note = Probe
  source 1..21: mol_type = other DNA
actctgaatccagcgatccga

SEQ ID NO: 52341 - DNA, 23 bp, synthetic construct
  misc_feature 1..23: note = Probe
  source 1..23: mol_type = other DNA
actctgaatccagcgatccgagt

SEQ ID NO: 52342 - DNA, 24 bp, synthetic construct
  misc_feature 1..24: note = Probe
  source 1..24: mol_type = other DNA
actctgaatccagcgatccgagtt

SEQ ID NO: 52343 - DNA, 19 bp, synthetic construct
  misc_feature 1..19: note = Probe
  source 1..19: mol_type = other DNA
actctggactctgaatcca

SEQ ID NO: 52344 - DNA, 31 bp, synthetic construct
  misc_feature 1..31: note = Probe
  source 1..31: mol_type = other DNA
actctggactttgaatccagcgatccgagtt

SEQ ID NO: 52345 - DNA, 16 bp, synthetic construct
  misc_feature 1..16: note = Probe
  source 1..16: mol_type = other DNA
actcttaatcccaggg

SEQ ID NO: 52346 - DNA, 26 bp, synthetic construct
  misc_feature 1..26: note = Probe
  source 1..26: mol_type = other DNA
actcttttagtataaatagtaccgtt

SEQ ID NO: 52347 - DNA, 27 bp, synthetic construct
  misc_feature 1..27: note = Probe
  source 1..27: mol_type = other DNA
actcttttagtataaatagtaccgtta

SEQ ID NO: 52348 - DNA, 28 bp, synthetic construct
  misc_feature 1..28: note = Probe
  source 1..28: mol_type = other DNA
actcttttagtataaatagtaccgttaa

SEQ ID NO: 52349 - DNA, 29 bp, synthetic construct
  misc_feature 1..29: note = Probe
  source 1..29: mol_type = other DNA
actcttttagtataaatagtaccgttaac

SEQ ID NO: 52350 - DNA, 30 bp, synthetic construct; identical to SEQ ID NO: 2927
  misc_feature 1..30: note = Probe
  source 1..30: mol_type = other DNA

SEQ ID NO: 52351 - DNA, 31 bp, synthetic construct; identical to SEQ ID NO: 2928
  misc_feature 1..31: note = Probe
  source 1..31: mol_type = other DNA

SEQ ID NO: 52352 - DNA, 32 bp, synthetic construct; identical to SEQ ID NO: 195
  misc_feature 1..32: note = Probe
  source 1..32: mol_type = other DNA

SEQ ID NO: 52353 - DNA, 33 bp, synthetic construct; identical to SEQ ID NO: 196
  misc_feature 1..33: note = Probe
  source 1..33: mol_type = other DNA

SEQ ID NO: 52354 - DNA, 37 bp, synthetic construct; identical to SEQ ID NO: 198
  misc_feature 1..37: note = Probe
  source 1..37: mol_type = other DNA

SEQ ID NO: 52355 - DNA, 38 bp, synthetic construct
  misc_feature 1..38: note = Probe
  source 1..38: mol_type = other DNA
actcttttagtataaatagtaccgttaacttccaatta

SEQ ID NO: 52356 - DNA, 44 bp, synthetic construct; identical to SEQ ID NO: 2930
  misc_feature 1..44: note = Probe
  source 1..44: mol_type = other DNA

SEQ ID NO: 52357 - DNA, 45 bp, synthetic construct; identical to SEQ ID NO: 2931
  misc_feature 1..45: note = Probe
  source 1..45: mol_type = other DNA

SEQ ID NO: 52358 - DNA, 50 bp, synthetic construct; identical to SEQ ID NO: 199
  misc_feature 1..50: note = Probe
  source 1..50: mol_type = other DNA

SEQ ID NO: 52359 - DNA, 44 bp, synthetic construct; identical to SEQ ID NO: 2939
  misc_feature 1..44: note = Probe
  source 1..44: mol_type = other DNA

SEQ ID NO: 52360 - DNA, 45 bp, synthetic construct; identical to SEQ ID NO: 2940
  misc_feature 1..45: note = Probe
  source 1..45: mol_type = other DNA

SEQ ID NO: 52361 - DNA, 20 bp, synthetic construct
  misc_feature 1..20: note = Probe
  source 1..20: mol_type = other DNA
actgctaactcatgccccca

SEQ ID NO: 52362 - DNA, 23 bp, synthetic construct
  misc_feature 1..23: note = Probe
  source 1..23: mol_type = other DNA
actgctaactcatgcccccatgt

SEQ ID NO: 52363 - DNA, 37 bp, synthetic construct; identical to SEQ ID NO: 2947
  misc_feature 1..37: note = Probe
  source 1..37: mol_type = other DNA

SEQ ID NO: 52364 - DNA, 38 bp, synthetic construct; identical to SEQ ID NO: 2948
  misc_feature 1..38: note = Probe
  source 1..38: mol_type = other DNA

SEQ ID NO: 52365 - DNA, 39 bp, synthetic construct; identical to SEQ ID NO: 2949
  misc_feature 1..39: note = Probe
  source 1..39: mol_type = other DNA

SEQ ID NO: 52366 - DNA, 40 bp, synthetic construct; identical to SEQ ID NO: 2950
  misc_feature 1..40: note = Probe
  source 1..40: mol_type = other DNA

SEQ ID NO: 52367 - DNA, 41 bp, synthetic construct; identical to SEQ ID NO: 2951
  misc_feature 1..41: note = Probe
  source 1..41: mol_type = other DNA

SEQ ID NO: 52368 - DNA, 42 bp, synthetic construct; identical to SEQ ID NO: 2952
  misc_feature 1..42: note = Probe
  source 1..42: mol_type = other DNA

SEQ ID NO: 52369 - DNA, 43 bp, synthetic construct; identical to SEQ ID NO: 2953
  misc_feature 1..43: note = Probe
  source 1..43: mol_type = other DNA

SEQ ID NO: 52370 - DNA, 44 bp, synthetic construct; identical to SEQ ID NO: 2954
  misc_feature 1..44: note = Probe
  source 1..44: mol_type = other DNA

SEQ ID NO: 52371 - DNA, 45 bp, synthetic construct; identical to SEQ ID NO: 2955
  misc_feature 1..45: note = Probe
  source 1..45: mol_type = other DNA

SEQ ID NO: 52372 - DNA, 46 bp, synthetic construct; identical to SEQ ID NO: 2956
  misc_feature 1..46: note = Probe
  source 1..46: mol_type = other DNA

SEQ ID NO: 52373 - DNA, 50 bp, synthetic construct; identical to SEQ ID NO: 2958
  misc_feature 1..50: note = Probe
  source 1..50: mol_type = other DNA

SEQ ID NO: 52374 - DNA, 43 bp, synthetic construct; identical to SEQ ID NO: 2960
  misc_feature 1..43: note = Probe
  source 1..43: mol_type = other DNA

SEQ ID NO: 52375 - DNA, 37 bp, synthetic construct; identical to SEQ ID NO: 200
  misc_feature 1..37: note = Probe
  source 1..37: mol_type = other DNA

SEQ ID NO: 52376 - DNA, 38 bp, synthetic construct; identical to SEQ ID NO: 2962
  misc_feature 1..38: note = Probe
  source 1..38: mol_type = other DNA

SEQ ID NO: 52377 - DNA, 39 bp, synthetic construct; identical to SEQ ID NO: 2963
  misc_feature 1..39: note = Probe
  source 1..39: mol_type = other DNA

SEQ ID NO: 52378 - DNA, 40 bp, synthetic construct; identical to SEQ ID NO: 2964
  misc_feature 1..40: note = Probe
  source 1..40: mol_type = other DNA

SEQ ID NO: 52379 - DNA, 41 bp, synthetic construct; identical to SEQ ID NO: 2965
  misc_feature 1..41: note = Probe
  source 1..41: mol_type = other DNA

SEQ ID NO: 52380 - DNA, 42 bp, synthetic construct; identical to SEQ ID NO: 2966
  misc_feature 1..42: note = Probe
  source 1..42: mol_type = other DNA

SEQ ID NO: 52381 - DNA, 43 bp, synthetic construct; identical to SEQ ID NO: 2967
  misc_feature 1..43: note = Probe
  source 1..43: mol_type = other DNA

SEQ ID NO: 52382 - DNA, 45 bp, synthetic construct; identical to SEQ ID NO: 2969
  misc_feature 1..45: note = Probe
  source 1..45: mol_type = other DNA

SEQ ID NO: 52383 - DNA, 46 bp, synthetic construct; identical to SEQ ID NO: 2970
  misc_feature 1..46: note = Probe
  source 1..46: mol_type = other DNA

SEQ ID NO: 52384 - DNA, 23 bp, synthetic construct
  misc_feature 1..23: note = Probe
  source 1..23: mol_type = other DNA
acttaacttgaccgctctgagct

SEQ ID NO: 52385 - DNA, 35 bp, synthetic construct; identical to SEQ ID NO: 2982
  misc_feature 1..35: note = Probe
  source 1..35: mol_type = other DNA

SEQ ID NO: 52386 - DNA, 37 bp, synthetic construct; identical to SEQ ID NO: 2984
  misc_feature 1..37: note = Probe
  source 1..37: mol_type = other DNA

SEQ ID NO: 52387 - DNA, 42 bp, synthetic construct; identical to SEQ ID NO: 2988
  misc_feature 1..42: note = Probe
  source 1..42: mol_type = other DNA

SEQ ID NO: 52388 - DNA, 43 bp, synthetic construct; identical to SEQ ID NO: 2989
  misc_feature 1..43: note = Probe
  source 1..43: mol_type = other DNA

SEQ ID NO: 52389 - DNA, 44 bp, synthetic construct; identical to SEQ ID NO: 2990
  misc_feature 1..44: note = Probe
  source 1..44: mol_type = other DNA

SEQ ID NO: 52390 - DNA, 45 bp, synthetic construct; identical to SEQ ID NO: 2991
  misc_feature 1..45: note = Probe
  source 1..45: mol_type = other DNA

SEQ ID NO: 52391 - DNA, 38 bp, synthetic construct
  misc_feature 1..38: note = Probe
  source 1..38: mol_type = other DNA
acttagcattaaccttttaagttaaagattaagagaac

SEQ ID NO: 52392 - DNA, 40 bp, synthetic construct; identical to SEQ ID NO: 12626
  misc_feature 1..40: note = Probe
  source 1..40: mol_type = other DNA

SEQ ID NO: 52393 - DNA, 50 bp, synthetic construct; identical to SEQ ID NO: 201
  misc_feature 1..50: note = Probe
  source 1..50: mol_type = other DNA

SEQ ID NO: 52394 - DNA, 37 bp, synthetic construct; identical to SEQ ID NO: 3004
  misc_feature 1..37: note = Probe
  source 1..37: mol_type = other DNA

SEQ ID NO: 52395 - DNA, 38 bp, synthetic construct; identical to SEQ ID NO: 3005
  misc_feature 1..38: note = Probe
  source 1..38: mol_type = other DNA

SEQ ID NO: 52396 - DNA, 42 bp, synthetic construct; identical to SEQ ID NO: 44861
  misc_feature 1..42: note = Probe
  source 1..42: mol_type = other DNA

SEQ ID NO: 52397 - DNA, 44 bp, synthetic construct; identical to SEQ ID NO: 3010
  misc_feature 1..44: note = Probe
  source 1..44: mol_type = other DNA

SEQ ID NO: 52398 - DNA, 19 bp, synthetic construct
  misc_feature 1..19: note = Probe
  source 1..19: mol_type = other DNA
actttacagtcagaggttc

SEQ ID NO: 52399 - DNA, 26 bp, synthetic construct
  misc_feature 1..26: note = Probe
  source 1..26: mol_type = other DNA
actttacagtcagaggttcaattcct

SEQ ID NO: 52400 - DNA, 29 bp, synthetic construct
  misc_feature 1..29: note = Probe
  source 1..29: mol_type = other DNA
actttacagtcagaggttcaattcctctt

SEQ ID NO: 52401 - DNA, 30 bp, synthetic construct; identical to SEQ ID NO: 202
  misc_feature 1..30: note = Probe
  source 1..30: mol_type = other DNA

SEQ ID NO: 52402 - DNA, 31 bp, synthetic construct; identical to SEQ ID NO: 3013
  misc_feature 1..31: note = Probe
  source 1..31: mol_type = other DNA

SEQ ID NO: 52403 - DNA, 32 bp, synthetic construct; identical to SEQ ID NO: 3014
  misc_feature 1..32: note = Probe
  source 1..32: mol_type = other DNA

SEQ ID NO: 52404 - DNA, 33 bp, synthetic construct; identical to SEQ ID NO: 3015
  misc_feature 1..33: note = Probe
  source 1..33: mol_type = other DNA

SEQ ID NO: 52405 - DNA, 34 bp, synthetic construct; identical to SEQ ID NO: 44870
  misc_feature 1..34: note = Probe
  source 1..34: mol_type = other DNA

SEQ ID NO: 52406 - DNA, 35 bp, synthetic construct; identical to SEQ ID NO: 3016
  misc_feature 1..35: note = Probe
  source 1..35: mol_type = other DNA

SEQ ID NO: 52407 - DNA, 36 bp, synthetic construct; identical to SEQ ID NO: 16031
  misc_feature 1..36: note = Probe
  source 1..36: mol_type = other DNA

SEQ ID NO: 52408 - DNA, 38 bp, synthetic construct; identical to SEQ ID NO: 3018
  misc_feature 1..38: note = Probe
  source 1..38: mol_type = other DNA

SEQ ID NO: 52409 - DNA, 39 bp, synthetic construct; identical to SEQ ID NO: 3019
  misc_feature 1..39: note = Probe
  source 1..39: mol_type = other DNA

SEQ ID NO: 52410 - DNA, 16 bp, synthetic construct
  misc_feature 1..16: note = Probe
  source 1..16: mol_type = other DNA
actttgaatccagcga

SEQ ID NO: 52411 - DNA, 21 bp, synthetic construct
  misc_feature 1..21: note = Probe
  source 1..21: mol_type = other DNA
actttgaatccagcgatccga

SEQ ID NO: 52412 - DNA, 25 bp, synthetic construct
  misc_feature 1..25: note = Probe
  source 1..25: mol_type = other DNA
actttgaatccagcgatccgagttc

SEQ ID NO: 52413 - DNA, 26 bp, synthetic construct
  misc_feature 1..26: note = Probe
  source 1..26: mol_type = other DNA
actttgaatccagcgatccgagttca

SEQ ID NO: 52414 - DNA, 34 bp, synthetic construct; identical to SEQ ID NO: 3023
  misc_feature 1..34: note = Probe
  source 1..34: mol_type = other DNA

SEQ ID NO: 52415 - DNA, 35 bp, synthetic construct; identical to SEQ ID NO: 3024
  misc_feature 1..35: note = Probe
  source 1..35: mol_type = other DNA

SEQ ID NO: 52416 - DNA, 36 bp, synthetic construct; identical to SEQ ID NO: 3025
  misc_feature 1..36: note = Probe
  source 1..36: mol_type = other DNA

SEQ ID NO: 52417 - DNA, 37 bp, synthetic construct; identical to SEQ ID NO: 203
  misc_feature 1..37: note = Probe
  source 1..37: mol_type = other DNA

SEQ ID NO: 52418 - DNA, 38 bp, synthetic construct; identical to SEQ ID NO: 204
  misc_feature 1..38: note = Probe
  source 1..38: mol_type = other DNA

SEQ ID NO: 52419 - DNA, 40 bp, synthetic construct; identical to SEQ ID NO: 3026
  misc_feature 1..40: note = Probe
  source 1..40: mol_type = other DNA

SEQ ID NO: 52420 - DNA, 41 bp, synthetic construct; identical to SEQ ID NO: 3027
  misc_feature 1..41: note = Probe
  source 1..41: mol_type = other DNA

SEQ ID NO: 52421 - DNA, 42 bp, synthetic construct; identical to SEQ ID NO: 3028
  misc_feature 1..42: note = Probe
  source 1..42: mol_type = other DNA

SEQ ID NO: 52422 - DNA, 43 bp, synthetic construct; identical to SEQ ID NO: 3029
  misc_feature 1..43: note = Probe
  source 1..43: mol_type = other DNA

SEQ ID NO: 52423 - DNA, 44 bp, synthetic construct; identical to SEQ ID NO: 3030
  misc_feature 1..44: note = Probe
  source 1..44: mol_type = other DNA

SEQ ID NO: 52424 - DNA, 45 bp, synthetic construct; identical to SEQ ID NO: 206
  misc_feature 1..45: note = Probe
  source 1..45: mol_type = other DNA

SEQ ID NO: 52425 - DNA, 46 bp, synthetic construct; identical to SEQ ID NO: 3031
  misc_feature 1..46: note = Probe
  source 1..46: mol_type = other DNA

SEQ ID NO: 52426 - DNA, 49 bp, synthetic construct; identical to SEQ ID NO: 3032
  misc_feature 1..49: note = Probe
  source 1..49: mol_type = other DNA

SEQ ID NO: 52427 - DNA, 50 bp, synthetic construct; identical to SEQ ID NO: 3033
  misc_feature 1..50: note = Probe
  source 1..50: mol_type = other DNA

SEQ ID NO: 52428 - DNA, 20 bp, synthetic construct
  misc_feature 1..20: note = Probe
  source 1..20: mol_type = other DNA
acttttaaaggataacagct

SEQ ID NO: 52429 - DNA, 28 bp, synthetic construct
  misc_feature 1..28: note = Probe
  source 1..28: mol_type = other DNA
acttttaaaggataacagctatccattg

SEQ ID NO: 52430 - DNA, 29 bp, synthetic construct
  misc_feature 1..29: note = Probe
  source 1..29: mol_type = other DNA
acttttaaaggataacagctatccattgg

SEQ ID NO: 52431 - DNA, 30 bp, synthetic construct; identical to SEQ ID NO: 209
  misc_feature 1..30: note = Probe
  source 1..30: mol_type = other DNA

SEQ ID NO: 52432 - DNA, 33 bp, synthetic construct; identical to SEQ ID NO: 3035
  misc_feature 1..33: note = Probe
  source 1..33: mol_type = other DNA

SEQ ID NO: 52433 - DNA, 34 bp, synthetic construct; identical to SEQ ID NO: 212
  misc_feature 1..34: note = Probe
  source 1..34: mol_type = other DNA

SEQ ID NO: 52434 - DNA, 35 bp, synthetic construct
  misc_feature 1..35: note = Probe
  source 1..35: mol_type = other DNA
acttttaaaggataacagctatccattggtcttag

SEQ ID NO: 52435 - DNA, 36 bp, synthetic construct; identical to SEQ ID NO: 24952
  misc_feature 1..36: note = Probe
  source 1..36: mol_type = other DNA

SEQ ID NO: 52436 - DNA, 38 bp, synthetic construct; identical to SEQ ID NO: 16055
  misc_feature 1..38: note = Probe
  source 1..38: mol_type = other DNA

SEQ ID NO: 52437 - DNA, 39 bp, synthetic construct; identical to SEQ ID NO: 3036
  misc_feature 1..39: note = Probe
  source 1..39: mol_type = other DNA

SEQ ID NO: 52438 - DNA, 40 bp, synthetic construct; identical to SEQ ID NO: 16056
  misc_feature 1..40: note = Probe
  source 1..40: mol_type = other DNA

SEQ ID NO: 52439 - DNA, 41 bp, synthetic construct; identical to SEQ ID NO: 3037
  misc_feature 1..41: note = Probe
  source 1..41: mol_type = other DNA

SEQ ID NO: 52440 - DNA, 42 bp, synthetic construct; identical to SEQ ID NO: 16058
  misc_feature 1..42: note = Probe
  source 1..42: mol_type = other DNA

SEQ ID NO: 52441 - DNA, 44 bp, synthetic construct; identical to SEQ ID NO: 16059
  misc_feature 1..44: note = Probe
  source 1..44: mol_type = other DNA

SEQ ID NO: 52442 - DNA, 24 bp, synthetic construct
  misc_feature 1..24: note = Probe
  source 1..24: mol_type = other DNA
acttttaatctgagggtccagggt

SEQ ID NO: 52443 - DNA, 29 bp, synthetic construct
  misc_feature 1..29: note = Probe
  source 1..29: mol_type = other DNA
agaaagctcacaagaactgctaactcatg

SEQ ID NO: 52444 - DNA, 50 bp, synthetic construct; identical to SEQ ID NO: 216
  misc_feature 1..50: note = Probe
  source 1..50: mol_type = other DNA

SEQ ID NO: 52445 - DNA, 33 bp, synthetic construct
  misc_feature 1..33: note = Probe
  source 1..33: mol_type = other DNA
agaaatatgtctgataaaagagttactttgata

SEQ ID NO: 52446 - DNA, 45 bp, synthetic construct
  misc_feature 1..45: note = Probe
  source 1..45: mol_type = other DNA
agaaatatgtctgataaaagagttactttgatagagtaaataata

SEQ ID NO: 52447 - DNA, 50 bp, synthetic construct; identical to SEQ ID NO: 217
  misc_feature 1..50: note = Probe
  source 1..50: mol_type = other DNA

SEQ ID NO: 52448 - DNA, 16 bp, synthetic construct
  misc_feature 1..16: note = Probe
  source 1..16: mol_type = other DNA
agaacagggtttgtta

SEQ ID NO: 52449 - DNA, 27 bp, synthetic construct
  misc_feature 1..27: note = Probe
  source 1..27: mol_type = other DNA
agaaccaacacctctttacagtgaaat

SEQ ID NO: 52450 - DNA, 17 bp, synthetic construct
  misc_feature 1..17: note = Probe
  source 1..17: mol_type = other DNA
agaactgctaactcatg

SEQ ID NO: 52451 - DNA, 40 bp, synthetic construct; identical to SEQ ID NO: 218
  misc_feature 1..40: note = Probe
  source 1..40: mol_type = other DNA

SEQ ID NO: 52452 - DNA, 41 bp, synthetic construct; identical to SEQ ID NO: 219
  misc_feature 1..41: note = Probe
  source 1..41: mol_type = other DNA

SEQ ID NO: 52453 - DNA, 42 bp, synthetic construct; identical to SEQ ID NO: 220
  misc_feature 1..42: note = Probe
  source 1..42: mol_type = other DNA

SEQ ID NO: 52454 - DNA, 43 bp, synthetic construct; identical to SEQ ID NO: 221
  misc_feature 1..43: note = Probe
  source 1..43: mol_type = other DNA

SEQ ID NO: 52455 - DNA, 44 bp, synthetic construct; identical to SEQ ID NO: 222
  misc_feature 1..44: note = Probe
  source 1..44: mol_type = other DNA

SEQ ID NO: 52456 - DNA, 45 bp, synthetic construct; identical to SEQ ID NO: 223
  misc_feature 1..45: note = Probe
  source 1..45: mol_type = other DNA

SEQ ID NO: 52457 - DNA, 46 bp, synthetic construct; identical to SEQ ID NO: 224
  misc_feature 1..46: note = Probe
  source 1..46: mol_type = other DNA

SEQ ID NO: 52458 - DNA, 50 bp, synthetic construct; identical to SEQ ID NO: 3070
  misc_feature 1..50: note = Probe
  source 1..50: mol_type = other DNA

SEQ ID NO: 52459 - DNA, 31 bp, synthetic construct; identical to SEQ ID NO: 3091
  misc_feature 1..31: note = Probe
  source 1..31: mol_type = other DNA

SEQ ID NO: 52460 - DNA, 50 bp, synthetic construct; identical to SEQ ID NO: 235
  misc_feature 1..50: note = Probe
  source 1..50: mol_type = other DNA

SEQ ID NO: 52461 - DNA, 18 bp, synthetic construct
  misc_feature 1..18: note = Probe
  source 1..18: mol_type = other DNA
agaattctcgcctgccac

SEQ ID NO: 52462 - DNA, 19 bp, synthetic construct
  misc_feature 1..19: note = Probe
  source 1..19: mol_type = other DNA
agaattctcgcctgccacg

SEQ ID NO: 52463 - DNA, 20 bp, synthetic construct
  misc_feature 1..20: note = Probe
  source 1..20: mol_type = other DNA
agaattctcgcctgccacgc

SEQ ID NO: 52464 - DNA, 29 bp, synthetic construct
  misc_feature 1..29: note = Probe
  source 1..29: mol_type = other DNA
agaattctcgcctgccacgcgggaggccc

SEQ ID NO: 52465 - DNA, 33 bp, synthetic construct; identical to SEQ ID NO: 16134
  misc_feature 1..33: note = Probe
  source 1..33: mol_type = other DNA

SEQ ID NO: 52466 - DNA, 22 bp, synthetic construct
  misc_feature 1..22: note = Probe
  source 1..22: mol_type = other DNA
agaccggggttcaattccccga

SEQ ID NO: 52467 - DNA, 23 bp, synthetic construct
  misc_feature 1..23: note = Probe
  source 1..23: mol_type = other DNA
agaccggggttcaattccccgac

SEQ ID NO: 52468 - DNA, 23 bp, synthetic construct
  misc_feature 1..23: note = Probe
  source 1..23: mol_type = other DNA
agaccggggttcgattccccgac

SEQ ID NO: 52469 - DNA, 24 bp, synthetic construct
  misc_feature 1..24: note = Probe
  source 1..24: mol_type = other DNA
agaccggggttcgattccccgacg

SEQ ID NO: 52470 - DNA, 32 bp, synthetic construct; identical to SEQ ID NO: 3122
  misc_feature 1..32: note = Probe
  source 1..32: mol_type = other DNA

SEQ ID NO: 52471 - DNA, 30 bp, synthetic construct; identical to SEQ ID NO: 3135
  misc_feature 1..30: note = Probe
  source 1..30: mol_type = other DNA

SEQ ID NO: 52472 - DNA, 21 bp, synthetic construct
  misc_feature 1..21: note = Probe
  source 1..21: mol_type = other DNA
agactcgcggccgccttaaga

SEQ ID NO: 52473 - DNA, 29 bp, synthetic construct
  misc_feature 1..29: note = Probe
  source 1..29: mol_type = other DNA
agagaaccaacacctctttacagtgaaat

SEQ ID NO: 52474 - DNA, 29 bp, synthetic construct
  misc_feature 1..29: note = Probe
  source 1..29: mol_type = other DNA
agagcatgagactcttaatctcagggtcg

SEQ ID NO: 52475 - DNA, 26 bp, synthetic construct
  misc_feature 1..26: note = Probe
  source 1..26: mol_type = other DNA
agagcatgggactcttaatcccaggg

SEQ ID NO: 52476 - DNA, 29 bp, synthetic construct
  misc_feature 1..29: note = Probe
  source 1..29: mol_type = other DNA
agagcatgggactcttaatcccagggtcg

SEQ ID NO: 52477 - DNA, 34 bp, synthetic construct; identical to SEQ ID NO: 16211
  misc_feature 1..34: note = Probe
  source 1..34: mol_type = other DNA

SEQ ID NO: 52478 - DNA, 17 bp, synthetic construct
  misc_feature 1..17: note = Probe
  source 1..17: mol_type = other DNA
agagcccggtaatcgca

SEQ ID NO: 52479 - DNA, 24 bp, synthetic construct
  misc_feature 1..24: note = Probe
  source 1..24: mol_type = other DNA
agagcccggtaatcgcataaaact

SEQ ID NO: 52480 - DNA, 31 bp, synthetic construct; identical to SEQ ID NO: 248
  misc_feature 1..31: note = Probe
  source 1..31: mol_type = other DNA

SEQ ID NO: 52481 - DNA, 32 bp, synthetic construct; identical to SEQ ID NO: 3144
  misc_feature 1..32: note = Probe
  source 1..32: mol_type = other DNA

SEQ ID NO: 52482 - DNA, 33 bp, synthetic construct
  misc_feature 1..33: note = Probe
  source 1..33: mol_type = other DNA
agagcccggtaatcgcataaaacttaaaacttt

SEQ ID NO: 52483 - DNA, 34 bp, synthetic construct
  misc_feature 1..34: note = Probe
  source 1..34: mol_type = other DNA
agagcccggtaatcgcataaaacttaaaacttta

SEQ ID NO: 52484 - DNA, 36 bp, synthetic construct; identical to SEQ ID NO: 44984
  misc_feature 1..36: note = Probe
  source 1..36: mol_type = other DNA

SEQ ID NO: 52485 - DNA, 39 bp, synthetic construct; identical to SEQ ID NO: 44985
  misc_feature 1..39: note = Probe
  source 1..39: mol_type = other DNA

SEQ ID NO: 52486 - DNA, 40 bp, synthetic construct; identical to SEQ ID NO: 3145
  misc_feature 1..40: note = Probe
  source 1..40: mol_type = other DNA

SEQ ID NO: 52487 - DNA, 46 bp, synthetic construct; identical to SEQ ID NO: 249
  misc_feature 1..46: note = Probe
  source 1..46: mol_type = other DNA

SEQ ID NO: 52488 - DNA, 49 bp, synthetic construct
  misc_feature 1..49: note = Probe
  source 1..49: mol_type = other DNA
agagcccggtaatcgcataaaacttaaaactttacagtcagaggttcaa

SEQ ID NO: 52489 - DNA, 31 bp, synthetic construct; identical to SEQ ID NO: 252
  misc_feature 1..31: note = Probe
  source 1..31: mol_type = other DNA

SEQ ID NO: 52490 - DNA, 39 bp, synthetic construct; identical to SEQ ID NO: 3158
  misc_feature 1..39: note = Probe
  source 1..39: mol_type = other DNA

SEQ ID NO: 52491 - DNA, 40 bp, synthetic construct; identical to SEQ ID NO: 3159
  misc_feature 1..40: note = Probe
  source 1..40: mol_type = other DNA

SEQ ID NO: 52492 - DNA, 26 bp, synthetic construct
  misc_feature 1..26: note = Probe
  source 1..26: mol_type = other DNA
agagtggggttttgcagtccttagct

SEQ ID NO: 52493 - DNA, 45 bp, synthetic construct
  misc_feature 1..45: note = Probe
  source 1..45: mol_type = other DNA
agagttactttgatagagtaaataataggagcttaaaccccctta

SEQ ID NO: 52494 - DNA, 50 bp, synthetic construct; identical to SEQ ID NO: 3171
  misc_feature 1..50: note = Probe
  source 1..50: mol_type = other DNA

SEQ ID NO: 52495 - DNA, 28 bp, synthetic construct
  misc_feature 1..28: note = Probe
  source 1..28: mol_type = other DNA
agatgaaaacctttttccaaggacaaat

SEQ ID NO: 52496 - DNA, 31 bp, synthetic construct; identical to SEQ ID NO: 3175
  misc_feature 1..31: note = Probe
  source 1..31: mol_type = other DNA

SEQ ID NO: 52497 - DNA, 32 bp, synthetic construct; identical to SEQ ID NO: 3176
  misc_feature 1..32: note = Probe
  source 1..32: mol_type = other DNA

SEQ ID NO: 52498 - DNA, 35 bp, synthetic construct; identical to SEQ ID NO: 3179
  misc_feature 1..35: note = Probe
  source 1..35: mol_type = other DNA

SEQ ID NO: 52499 - DNA, 21 bp, synthetic construct
  misc_feature 1..21: note = Probe
  source 1..21: mol_type = other DNA
agattcccattcttgcgaccc

SEQ ID NO: 52500 - DNA, 33 bp, synthetic construct; identical to SEQ ID NO: 3184
  misc_feature 1..33: note = Probe
  source 1..33: mol_type = other DNA

SEQ ID NO: 52501 - DNA, 38 bp, synthetic construct; identical to SEQ ID NO: 267
  misc_feature 1..38: note = Probe
  source 1..38: mol_type = other DNA

SEQ ID NO: 52502 - DNA, 39 bp, synthetic construct; identical to SEQ ID NO: 268
  misc_feature 1..39: note = Probe
  source 1..39: mol_type = other DNA

SEQ ID NO: 52503 - DNA, 40 bp, synthetic construct; identical to SEQ ID NO: 3198
  misc_feature 1..40: note = Probe
  source 1..40: mol_type = other DNA

SEQ ID NO: 52504 - DNA, 50 bp, synthetic construct; identical to SEQ ID NO: 3205
  misc_feature 1..50: note = Probe
  source 1..50: mol_type = other DNA

SEQ ID NO: 52505 - DNA, 31 bp, synthetic construct; identical to SEQ ID NO: 3215
  misc_feature 1..31: note = Probe
  source 1..31: mol_type = other DNA

SEQ ID NO: 52506 - DNA, 43 bp, synthetic construct; identical to SEQ ID NO: 3246
  misc_feature 1..43: note = Probe
  source 1..43: mol_type = other DNA

SEQ ID NO: 52507 - DNA, 50 bp, synthetic construct; identical to SEQ ID NO: 3251
  misc_feature 1..50: note = Probe
  source 1..50: mol_type = other DNA

SEQ ID NO: 52508 - DNA, 28 bp, synthetic construct
  misc_feature 1..28: note = Probe
  source 1..28: mol_type = other DNA
agcactctggactctgaatccagcgatc

SEQ ID NO: 52509 - DNA, 31 bp, synthetic construct; identical to SEQ ID NO: 271
  misc_feature 1..31: note = Probe
  source 1..31: mol_type = other DNA

SEQ ID NO: 52510 - DNA, 33 bp, synthetic construct; identical to SEQ ID NO: 27739
  misc_feature 1..33: note = Probe
  source 1..33: mol_type = other DNA

SEQ ID NO: 52511 - DNA, 34 bp, synthetic construct; identical to SEQ ID NO: 27740
  misc_feature 1..34: note = Probe
  source 1..34: mol_type = other DNA

SEQ ID NO: 52512 - DNA, 30 bp, synthetic construct; identical to SEQ ID NO: 12674
  misc_feature 1..30: note = Probe
  source 1..30: mol_type = other DNA

SEQ ID NO: 52513 - DNA, 31 bp, synthetic construct; identical to SEQ ID NO: 42515
  misc_feature 1..31: note = Probe
  source 1..31: mol_type = other DNA

SEQ ID NO: 52514 - DNA, 33 bp, synthetic construct; identical to SEQ ID NO: 12675
  misc_feature 1..33: note = Probe
  source 1..33: mol_type = other DNA

SEQ ID NO: 52515 - DNA, 34 bp, synthetic construct; identical to SEQ ID NO: 27746
  misc_feature 1..34: note = Probe
  source 1..34: mol_type = other DNA

SEQ ID NO: 52516 - DNA, 20 bp, synthetic construct
  misc_feature 1..20: note = Probe
  source 1..20: mol_type = other DNA
agcacttcccatatggtcta

SEQ ID NO: 52517 - DNA, 33 bp, synthetic construct; identical to SEQ ID NO: 277
  misc_feature 1..33: note = Probe
  source 1..33: mol_type = other DNA

SEQ ID NO: 52518 - DNA, 34 bp, synthetic construct; identical to SEQ ID NO: 278
  misc_feature 1..34: note = Probe
  source 1..34: mol_type = other DNA

SEQ ID NO: 52519 - DNA, 28 bp, synthetic construct
  misc_feature 1..28: note = Probe
  source 1..28: mol_type = other DNA
agcatagctgccttccaagcagttgacc

SEQ ID NO: 52520 - DNA, 27 bp, synthetic construct
  misc_feature 1..27: note = Probe
  source 1..27: mol_type = other DNA
agcatgggactcttaatcccagggtcg

SEQ ID NO: 52521 - DNA, 32 bp, synthetic construct; identical to SEQ ID NO: 16393
  misc_feature 1..32: note = Probe
  source 1..32: mol_type = other DNA

SEQ ID NO: 52522 - DNA, 26 bp, synthetic construct
  misc_feature 1..26: note = Probe
  source 1..26: mol_type = other DNA
agcattaaccttttaagttaaagatt

SEQ ID NO: 52523 - DNA, 27 bp, synthetic construct
  misc_feature 1..27: note = Probe
  source 1..27: mol_type = other DNA
agcattaaccttttaagttaaagatta

SEQ ID NO: 52524 - DNA, 32 bp, synthetic construct; identical to SEQ ID NO: 16399
  misc_feature 1..32: note = Probe
  source 1..32: mol_type = other DNA

SEQ ID NO: 52525 - DNA, 33 bp, synthetic construct; identical to SEQ ID NO: 12688
  misc_feature 1..33: note = Probe
  source 1..33: mol_type = other DNA

SEQ ID NO: 52526 - DNA, 34 bp, synthetic construct; identical to SEQ ID NO: 12689
  misc_feature 1..34: note = Probe
  source 1..34: mol_type = other DNA

SEQ ID NO: 52527 - DNA, 37 bp, synthetic construct; identical to SEQ ID NO: 282
  misc_feature 1..37: note = Probe
  source 1..37: mol_type = other DNA

SEQ ID NO: 52528 - DNA, 38 bp, synthetic construct; identical to SEQ ID NO: 3273
  misc_feature 1..38: note = Probe
  source 1..38: mol_type = other DNA

SEQ ID NO: 52529 - DNA, 39 bp, synthetic construct; identical to SEQ ID NO: 283
  misc_feature 1..39: note = Probe
  source 1..39: mol_type = other DNA

SEQ ID NO: 52530 - DNA, 41 bp, synthetic construct; identical to SEQ ID NO: 3275
  misc_feature 1..41: note = Probe
  source 1..41: mol_type = other DNA

SEQ ID NO: 52531 - DNA, 44 bp, synthetic construct; identical to SEQ ID NO: 45131
  misc_feature 1..44: note = Probe
  source 1..44: mol_type = other DNA

SEQ ID NO: 52532 - DNA, 48 bp, synthetic construct; identical to SEQ ID NO: 3279
  misc_feature 1..48: note = Probe
  source 1..48: mol_type = other DNA

SEQ ID NO: 52533 - DNA, 49 bp, synthetic construct; identical to SEQ ID NO: 3280
  misc_feature 1..49: note = Probe
  source 1..49: mol_type = other DNA

SEQ ID NO: 52534 - DNA, 20 bp, synthetic construct
  misc_feature 1..20: note = Probe
  source 1..20: mol_type = other DNA
agccagggattgtgggttcg

SEQ ID NO: 52535 - DNA, 21 bp, synthetic construct
  misc_feature 1..21: note = Probe
  source 1..21: mol_type = other DNA
agccccaaacccactccacct

SEQ ID NO: 52536 - DNA, 24 bp, synthetic construct
  misc_feature 1..24: note = Probe
  source 1..24: mol_type = other DNA
agcccggtaatcgcataaaactta

SEQ ID NO: 52537 - DNA, 30 bp, synthetic construct; identical to SEQ ID NO: 16435
  misc_feature 1..30: note = Probe
  source 1..30: mol_type = other DNA

SEQ ID NO: 52538 - DNA, 38 bp, synthetic construct; identical to SEQ ID NO: 292
  misc_feature 1..38: note = Probe
  source 1..38: mol_type = other DNA

SEQ ID NO: 52539 - DNA, 50 bp, synthetic construct; identical to SEQ ID NO: 3296
  misc_feature 1..50: note = Probe
  source 1..50: mol_type = other DNA

SEQ ID NO: 52540 - DNA, 15 bp, synthetic construct
  misc_feature 1..15: note = Probe
  source 1..15: mol_type = other DNA
agcctttctattagc

SEQ ID NO: 52541 - DNA, 17 bp, synthetic construct
  misc_feature 1..17: note = Probe
  source 1..17: mol_type = other DNA
agcggttaggattcctg

SEQ ID NO: 52542 - DNA, 18 bp, synthetic construct
  misc_feature 1..18: note = Probe
  source 1..18: mol_type = other DNA
agcggttaggattcctgg

SEQ ID NO: 52543 - DNA, 26 bp, synthetic construct
  misc_feature 1..26: note = Probe
  source 1..26: mol_type = other DNA
agcggttaggattcctggttttcacc

SEQ ID NO: 52544 - DNA, 27 bp, synthetic construct
  misc_feature 1..27: note = Probe
  source 1..27: mol_type = other DNA
agcggttaggattcctggttttcaccc

SEQ ID NO: 52545 - DNA, 35 bp, synthetic construct
  misc_feature 1..35: note = Probe
  source 1..35: mol_type = other DNA
agcggttaggattcctggttttcacccaggcggcc

SEQ ID NO: 52546 - DNA, 24 bp, synthetic construct
  misc_feature 1..24: note = Probe
  source 1..24: mol_type = other DNA
agcggttatcacattcgcctcaca

SEQ ID NO: 52547 - DNA, 26 bp, synthetic construct
  misc_feature 1..26: note = Probe
  source 1..26: mol_type = other DNA
agcggttatcacattcgcctcacacg

SEQ ID NO: 52548 - DNA, 31 bp, synthetic construct; identical to SEQ ID NO: 3315
  misc_feature 1..31: note = Probe
  source 1..31: mol_type = other DNA

SEQ ID NO: 52549 - DNA, 25 bp, synthetic construct
  misc_feature 1..25: note = Probe
  source 1..25: mol_type = other DNA
agctaaataagctatcgggcccata

SEQ ID NO: 52550 - DNA, 26 bp, synthetic construct
  misc_feature 1..26: note = Probe
  source 1..26: mol_type = other DNA
agctaaataagctatcgggcccatac

SEQ ID NO: 52551 - DNA, 27 bp, synthetic construct
  misc_feature 1..27: note = Probe
  source 1..27: mol_type = other DNA
agctaaataagctatcgggcccatacc

SEQ ID NO: 52552 - DNA, 28 bp, synthetic construct
  misc_feature 1..28: note = Probe
  source 1..28: mol_type = other DNA
agctaaataagctatcgggcccataccc

SEQ ID NO: 52553 - DNA, 35 bp, synthetic construct; identical to SEQ ID NO: 3322
  misc_feature 1..35: note = Probe
  source 1..35: mol_type = other DNA

SEQ ID NO: 52554 - DNA, 21 bp, synthetic construct
  misc_feature 1..21: note = Probe
  source 1..21: mol_type = other DNA
agctatcgggcccataccccg

SEQ ID NO: 52555 - DNA, 24 bp, synthetic construct
  misc_feature 1..24: note = Probe
  source 1..24: mol_type = other DNA
agctatcgggcccataccccgaaa

SEQ ID NO: 52556 - DNA, 25 bp, synthetic construct
  misc_feature 1..25: note = Probe
  source 1..25: mol_type = other DNA
agctatcgggcccataccccgaaaa

SEQ ID NO: 52557 - DNA, 26 bp, synthetic construct
  misc_feature 1..26: note = Probe
  source 1..26: mol_type = other DNA
agctatcgggcccataccccgaaaat

SEQ ID NO: 52558 - DNA, 27 bp, synthetic construct
  misc_feature 1..27: note = Probe
  source 1..27: mol_type = other DNA
agctatcgggcccataccccgaaaatg

SEQ ID NO: 52559 - DNA, 28 bp, synthetic construct
  misc_feature 1..28: note = Probe
  source 1..28: mol_type = other DNA
agctatcgggcccataccccgaaaatgt

SEQ ID NO: 52560 - DNA, 29 bp, synthetic construct
  misc_feature 1..29: note = Probe
  source 1..29: mol_type = other DNA
agctatcgggcccataccccgaaaatgtt

SEQ ID NO: 52561 - DNA, 30 bp, synthetic construct; identical to SEQ ID NO: 3337
  misc_feature 1..30: note = Probe
  source 1..30: mol_type = other DNA

SEQ ID NO: 52562 - DNA, 33 bp, synthetic construct; identical to SEQ ID NO: 3340
  misc_feature 1..33: note = Probe
  source 1..33: mol_type = other DNA

SEQ ID NO: 52563 - DNA, 50 bp, synthetic construct; identical to SEQ ID NO: 303
  misc_feature 1..50: note = Probe
  source 1..50: mol_type = other DNA

SEQ ID NO: 52564 - DNA, 25 bp, synthetic construct
  misc_feature 1..25: note = Probe
  source 1..25: mol_type = other DNA
agctcacaagaactgctaactcatg

SEQ ID NO: 52565 - DNA, 31 bp, synthetic construct; identical to SEQ ID NO: 3351
  misc_feature 1..31: note = Probe
  source 1..31: mol_type = other DNA

SEQ ID NO: 52566 - DNA, 50 bp, synthetic construct; identical to SEQ ID NO: 311
  misc_feature 1..50: note = Probe
  source 1..50: mol_type = other DNA

SEQ ID NO: 52567 - DNA, 19 bp, synthetic construct
  misc_feature 1..19: note = Probe
  source 1..19: mol_type = other DNA
agctccgaggtgattttca

SEQ ID NO: 52568 - DNA, 21 bp, synthetic construct
  misc_feature 1..21: note = Probe
  source 1..21: mol_type = other DNA
agctccgaggtgattttcata

SEQ ID NO: 52569 - DNA, 28 bp, synthetic construct
  misc_feature 1..28: note = Probe
  source 1..28: mol_type = other DNA
agctccgaggtgattttcatattgaatt

SEQ ID NO: 52570 - DNA, 29 bp, synthetic construct
  misc_feature 1..29: note = Probe
  source 1..29: mol_type = other DNA
agctccgaggtgattttcatattgaattg

SEQ ID NO: 52571 - DNA, 30 bp, synthetic construct; identical to SEQ ID NO: 314
  misc_feature 1..30: note = Probe
  source 1..30: mol_type = other DNA

SEQ ID NO: 52572 - DNA, 32 bp, synthetic construct; identical to SEQ ID NO: 316
  misc_feature 1..32: note = Probe
  source 1..32: mol_type = other DNA

SEQ ID NO: 52573 - DNA, 33 bp, synthetic construct; identical to SEQ ID NO: 3363
  misc_feature 1..33: note = Probe
  source 1..33: mol_type = other DNA

SEQ ID NO: 52574 - DNA, 34 bp, synthetic construct; identical to SEQ ID NO: 16559
  misc_feature 1..34: note = Probe
  source 1..34: mol_type = other DNA

SEQ ID NO: 52575 - DNA, 35 bp, synthetic construct; identical to SEQ ID NO: 3364
  misc_feature 1..35: note = Probe
  source 1..35: mol_type = other DNA

SEQ ID NO: 52576 - DNA, 36 bp, synthetic construct; identical to SEQ ID NO: 16561
  misc_feature 1..36: note = Probe
  source 1..36: mol_type = other DNA

SEQ ID NO: 52577 - DNA, 38 bp, synthetic construct; identical to SEQ ID NO: 3366
  misc_feature 1..38: note = Probe
  source 1..38: mol_type = other DNA

SEQ ID NO: 52578 - DNA, 39 bp, synthetic construct; identical to SEQ ID NO: 3367
  misc_feature 1..39: note = Probe
  source 1..39: mol_type = other DNA

SEQ ID NO: 52579 - DNA, 41 bp, synthetic construct
  misc_feature 1..41: note = Probe
  source 1..41: mol_type = other DNA
agctccgaggtgattttcatattgaattgcaaattcgaaga

SEQ ID NO: 52580 - DNA, 42 bp, synthetic construct
  misc_feature 1..42: note = Probe
  source 1..42: mol_type = other DNA
agctccgaggtgattttcatattgaattgcaaattcgaagaa

SEQ ID NO: 52581 - DNA, 44 bp, synthetic construct; identical to SEQ ID NO: 3369
  misc_feature 1..44: note = Probe
  source 1..44: mol_type = other DNA

SEQ ID NO: 52582 - DNA, 45 bp, synthetic construct; identical to SEQ ID NO: 3370
  misc_feature 1..45: note = Probe
  source 1..45: mol_type = other DNA

SEQ ID NO: 52583 - DNA, 49 bp, synthetic construct; identical to SEQ ID NO: 3373
  misc_feature 1..49: note = Probe
  source 1..49: mol_type = other DNA

SEQ ID NO: 52584 - DNA, 50 bp, synthetic construct; identical to SEQ ID NO: 3374
  misc_feature 1..50: note = Probe
  source 1..50: mol_type = other DNA

SEQ ID NO: 52585 - DNA, 25 bp, synthetic construct
  misc_feature 1..25: note = Probe
  source 1..25: mol_type = other DNA
agcttcaaacctgccggggcttctc

SEQ ID NO: 52586 - DNA, 28 bp, synthetic construct
  misc_feature 1..28: note = Probe
  source 1..28: mol_type = other DNA
agctttggggggttcgattccttccttt

SEQ ID NO: 52587 - DNA, 29 bp, synthetic construct
  misc_feature 1..29: note = Probe
  source 1..29: mol_type = other DNA
agctttggggggttcgattccttcctttt

SEQ ID NO: 52588 - DNA, 32 bp, synthetic construct; identical to SEQ ID NO: 3388
  misc_feature 1..32: note = Probe
  source 1..32: mol_type = other DNA

SEQ ID NO: 52589 - DNA, 35 bp, synthetic construct; identical to SEQ ID NO: 3391
  misc_feature 1..35: note = Probe
  source 1..35: mol_type = other DNA

SEQ ID NO: 52590 - DNA, 45 bp, synthetic construct; identical to SEQ ID NO: 3392
  misc_feature 1..45: note = Probe
  source 1..45: mol_type = other DNA

SEQ ID NO: 52591 - DNA, 50 bp, synthetic construct; identical to SEQ ID NO: 3393
  misc_feature 1..50: note = Probe
  source 1..50: mol_type = other DNA

SEQ ID NO: 52592 - DNA, 27 bp, synthetic construct
  misc_feature 1..27: note = Probe
  source 1..27: mol_type = other DNA
aggagatttcaacttaacttgaccgct

SEQ ID NO: 52593 - DNA, 33 bp, synthetic construct; identical to SEQ ID NO: 3413
  misc_feature 1..33: note = Probe
  source 1..33: mol_type = other DNA

SEQ ID NO: 52594 - DNA, 34 bp, synthetic construct; identical to SEQ ID NO: 3414
  misc_feature 1..34: note = Probe
  source 1..34: mol_type = other DNA

SEQ ID NO: 52595 - DNA, 28 bp, synthetic construct
  misc_feature 1..28: note = Probe
  source 1..28: mol_type = other DNA
aggattcctggttttcacccaggcggcc

SEQ ID NO: 52596 - DNA, 30 bp, synthetic construct; identical to SEQ ID NO: 16660
  misc_feature 1..30: note = Probe
  source 1..30: mol_type = other DNA

SEQ ID NO: 52597 - DNA, 29 bp, synthetic construct
  misc_feature 1..29: note = Probe
  source 1..29: mol_type = other DNA
aggattcctggttttcacccaggtggccc

SEQ ID NO: 52598 - DNA, 17 bp, synthetic construct
  misc_feature 1..17: note = Probe
  source 1..17: mol_type = other DNA
aggattcggcgctctca

SEQ ID NO: 52599 - DNA, 24 bp, synthetic construct
  misc_feature 1..24: note = Probe
  source 1..24: mol_type = other DNA
aggattcggcgctctcaccgccgc

SEQ ID NO: 52600 - DNA, 29 bp, synthetic construct
  misc_feature 1..29: note = Probe
  source 1..29: mol_type = other DNA
aggattcggcgctttcaccgccgcggccc

SEQ ID NO: 52601 - DNA, 18 bp, synthetic construct
  misc_feature 1..18: note = Probe
  source 1..18: mol_type = other DNA
aggcattggcctcctaag

SEQ ID NO: 52602 - DNA, 25 bp, synthetic construct
  misc_feature 1..25: note = Probe
  source 1..25: mol_type = other DNA
aggcattggcctcctaagccaggga

SEQ ID NO: 52603 - DNA, 41 bp, synthetic construct; identical to SEQ ID NO: 45284
  misc_feature 1..41: note = Probe
  source 1..41: mol_type = other DNA

SEQ ID NO: 52604 - DNA, 33 bp, synthetic construct; identical to SEQ ID NO: 16671
  misc_feature 1..33: note = Probe
  source 1..33: mol_type = other DNA

SEQ ID NO: 52605 - DNA, 25 bp, synthetic construct
  misc_feature 1..25: note = Probe
  source 1..25: mol_type = other DNA
aggctaaatcctatatatcttaatg

SEQ ID NO: 52606 - DNA, 25 bp, synthetic construct
  misc_feature 1..25: note = Probe
  source 1..25: mol_type = other DNA
agggattgtgggttcgagtcccatc

SEQ ID NO: 52607 - DNA, 16 bp, synthetic construct
  misc_feature 1..16: note = Probe
  source 1..16: mol_type = other DNA
aggggtatgattctcg

SEQ ID NO: 52608 - DNA, 17 bp, synthetic construct
  misc_feature 1..17: note = Probe
  source 1..17: mol_type = other DNA
aggggtatgattctcgc

SEQ ID NO: 52609 - DNA, 18 bp, synthetic construct
  misc_feature 1..18: note = Probe
  source 1..18: mol_type = other DNA
aggggtatgattctcgct

SEQ ID NO: 52610 - DNA, 36 bp, synthetic construct; identical to SEQ ID NO: 16721
  misc_feature 1..36: note = Probe
  source 1..36: mol_type = other DNA

SEQ ID NO: 52611 - DNA, 36 bp, synthetic construct; identical to SEQ ID NO: 16722
  misc_feature 1..36: note = Probe
  source 1..36: mol_type = other DNA

SEQ ID NO: 52612 - DNA, 36 bp, synthetic construct; identical to SEQ ID NO: 16723
  misc_feature 1..36: note = Probe
  source 1..36: mol_type = other DNA

SEQ ID NO: 52613 - DNA, 22 bp, synthetic construct
  misc_feature 1..22: note = Probe
  source 1..22: mol_type = other DNA
agggtgcgagaggtcccgggtt

SEQ ID NO: 52614 - DNA, 29 bp, synthetic construct
  misc_feature 1..29: note = Probe
  source 1..29: mol_type = other DNA
aggtcagctaaataagctatcgggcccat

SEQ ID NO: 52615 - DNA, 30 bp, synthetic construct; identical to SEQ ID NO: 3454
  misc_feature 1..30: note = Probe
  source 1..30: mol_type = other DNA

SEQ ID NO: 52616 - DNA, 31 bp, synthetic construct; identical to SEQ ID NO: 3455
  misc_feature 1..31: note = Probe
  source 1..31: mol_type = other DNA

SEQ ID NO: 52617 - DNA, 32 bp, synthetic construct; identical to SEQ ID NO: 3456
  misc_feature 1..32: note = Probe
  source 1..32: mol_type = other DNA

SEQ ID NO: 52618 - DNA, 33 bp, synthetic construct; identical to SEQ ID NO: 3457
  misc_feature 1..33: note = Probe
  source 1..33: mol_type = other DNA

SEQ ID NO: 52619 - DNA, 38 bp, synthetic construct; identical to SEQ ID NO: 3462
  misc_feature 1..38: note = Probe
  source 1..38: mol_type = other DNA

SEQ ID NO: 52620 - DNA, 39 bp, synthetic construct; identical to SEQ ID NO: 3463
  misc_feature 1..39: note = Probe
  source 1..39: mol_type = other DNA

SEQ ID NO: 52621 - DNA, 40 bp, synthetic construct; identical to SEQ ID NO: 3464
  misc_feature 1..40: note = Probe
  source 1..40: mol_type = other DNA

SEQ ID NO: 52622 - DNA, 41 bp, synthetic construct; identical to SEQ ID NO: 3465
  misc_feature 1..41: note = Probe
  source 1..41: mol_type = other DNA

SEQ ID NO: 52623 - DNA, 42 bp, synthetic construct; identical to SEQ ID NO: 3466
  misc_feature 1..42: note = Probe
  source 1..42: mol_type = other DNA

SEQ ID NO: 52624 - DNA, 43 bp, synthetic construct; identical to SEQ ID NO: 3467
  misc_feature 1..43: note = Probe
  source 1..43: mol_type = other DNA

SEQ ID NO: 52625 - DNA, 44 bp, synthetic construct; identical to SEQ ID NO: 3468
  misc_feature 1..44: note = Probe
  source 1..44: mol_type = other DNA

SEQ ID NO: 52626 - DNA, 45 bp, synthetic construct; identical to SEQ ID NO: 3469
  misc_feature 1..45: note = Probe
  source 1..45: mol_type = other DNA

SEQ ID NO: 52627 - DNA, 46 bp, synthetic construct; identical to SEQ ID NO: 3470
  misc_feature 1..46: note = Probe
  source 1..46: mol_type = other DNA

SEQ ID NO: 52628 - DNA, 50 bp, synthetic construct; identical to SEQ ID NO: 3474
  misc_feature 1..50: note = Probe
  source 1..50: mol_type = other DNA

SEQ ID NO: 52629 - DNA, 33 bp, synthetic construct; identical to SEQ ID NO: 3476
  misc_feature 1..33: note = Probe
  source 1..33: mol_type = other DNA

SEQ ID NO: 52630 - DNA, 27 bp, synthetic construct
  misc_feature 1..27: note = Probe
  source 1..27: mol_type = other DNA
aggtttggtcctagcctttctattagc

SEQ ID NO: 52631 - DNA, 21 bp, synthetic construct
  misc_feature 1..21: note = Probe
  source 1..21: mol_type = other DNA
agtaaacaggagatcctgggt

SEQ ID NO: 52632 - DNA, 22 bp, synthetic construct
  misc_feature 1..22: note = Probe
  source 1..22: mol_type = other DNA
agtaaacaggagatcctgggtt

SEQ ID NO: 52633 - DNA, 16 bp, synthetic construct
  misc_feature 1..16: note = Probe
  source 1..16: mol_type = other DNA
agtaaggtcagctaaa

SEQ ID NO: 52634 - DNA, 18 bp, synthetic construct
  misc_feature 1..18: note = Probe
  source 1..18: mol_type = other DNA
agtaaggtcagctaaata

SEQ ID NO: 52635 - DNA, 20 bp, synthetic construct
  misc_feature 1..20: note = Probe
  source 1..20: mol_type = other DNA
agtaaggtcagctaaataag

SEQ ID NO: 52636 - DNA, 21 bp, synthetic construct
  misc_feature 1..21: note = Probe
  source 1..21: mol_type = other DNA
agtaaggtcagctaaataagc

SEQ ID NO: 52637 - DNA, 23 bp, synthetic construct
  misc_feature 1..23: note = Probe
  source 1..23: mol_type = other DNA
agtaaggtcagctaaataagcta

SEQ ID NO: 52638 - DNA, 24 bp, synthetic construct
  misc_feature 1..24: note = Probe
  source 1..24: mol_type = other DNA
agtaaggtcagctaaataagctat

SEQ ID NO: 52639 - DNA, 25 bp, synthetic construct
  misc_feature 1..25: note = Probe
  source 1..25: mol_type = other DNA
agtaaggtcagctaaataagctatc

SEQ ID NO: 52640 - DNA, 26 bp, synthetic construct
  misc_feature 1..26: note = Probe
  source 1..26: mol_type = other DNA
agtaaggtcagctaaataagctatcg

SEQ ID NO: 52641 - DNA, 27 bp, synthetic construct
  misc_feature 1..27: note = Probe
  source 1..27: mol_type = other DNA
agtaaggtcagctaaataagctatcgg

SEQ ID NO: 52642 - DNA, 28 bp, synthetic construct
  misc_feature 1..28: note = Probe
  source 1..28: mol_type = other DNA
agtaaggtcagctaaataagctatcggg

SEQ ID NO: 52643 - DNA, 29 bp, synthetic construct
  misc_feature 1..29: note = Probe
  source 1..29: mol_type = other DNA
agtaaggtcagctaaataagctatcgggc

SEQ ID NO: 52644 - DNA, 30 bp, synthetic construct; identical to SEQ ID NO: 3514
  misc_feature 1..30: note = Probe
  source 1..30: mol_type = other DNA

SEQ ID NO: 52645 - DNA, 31 bp, synthetic construct; identical to SEQ ID NO: 3515
  misc_feature 1..31: note = Probe
  source 1..31: mol_type = other DNA

SEQ ID NO: 52646 - DNA, 32 bp, synthetic construct; identical to SEQ ID NO: 3516
  misc_feature 1..32: note = Probe
  source 1..32: mol_type = other DNA

SEQ ID NO: 52647 - DNA, 33 bp, synthetic construct; identical to SEQ ID NO: 3517
  misc_feature 1..33: note = Probe
  source 1..33: mol_type = other DNA

SEQ ID NO: 52648 - DNA, 34 bp, synthetic construct; identical to SEQ ID NO: 3518
  misc_feature 1..34: note = Probe
  source 1..34: mol_type = other DNA

SEQ ID NO: 52649 - DNA, 35 bp, synthetic construct; identical to SEQ ID NO: 3519
  misc_feature 1..35: note = Probe
  source 1..35: mol_type = other DNA

SEQ ID NO: 52650 - DNA, 36 bp, synthetic construct; identical to SEQ ID NO: 3520
  misc_feature 1..36: note = Probe
  source 1..36: mol_type = other DNA

SEQ ID NO: 52651 - DNA, 37 bp, synthetic construct; identical to SEQ ID NO: 3521
  misc_feature 1..37: note = Probe
  source 1..37: mol_type = other DNA

SEQ ID NO: 52652 - DNA, 38 bp, synthetic construct; identical to SEQ ID NO: 3522
  misc_feature 1..38: note = Probe
  source 1..38: mol_type = other DNA

SEQ ID NO: 52653 - DNA, 39 bp, synthetic construct; identical to SEQ ID NO: 3523
  misc_feature 1..39: note = Probe
  source 1..39: mol_type = other DNA

SEQ ID NO: 52654 - DNA, 40 bp, synthetic construct; identical to SEQ ID NO: 3524
  misc_feature 1..40: note = Probe
  source 1..40: mol_type = other DNA

SEQ ID NO: 52655 - DNA, 41 bp, synthetic construct; identical to SEQ ID NO: 3525
  misc_feature 1..41: note = Probe
  source 1..41: mol_type = other DNA

SEQ ID NO: 52656 - DNA, 42 bp, synthetic construct; identical to SEQ ID NO: 3526
  misc_feature 1..42: note = Probe
  source 1..42: mol_type = other DNA

SEQ ID NO: 52657 - DNA, 43 bp, synthetic construct; identical to SEQ ID NO: 3527
  misc_feature 1..43: note = Probe
  source 1..43: mol_type = other DNA

SEQ ID NO: 52658 - DNA, 44 bp, synthetic construct; identical to SEQ ID NO: 3528
  misc_feature 1..44: note = Probe
  source 1..44: mol_type = other DNA

SEQ ID NO: 52659 - DNA, 45 bp, synthetic construct; identical to SEQ ID NO: 3529
  misc_feature 1..45: note = Probe
  source 1..45: mol_type = other DNA

SEQ ID NO: 52660 - DNA, 46 bp, synthetic construct; identical to SEQ ID NO: 3530
  misc_feature 1..46: note = Probe
  source 1..46: mol_type = other DNA

SEQ ID NO: 52661 - DNA, 47 bp, synthetic construct; identical to SEQ ID NO: 3531
  misc_feature 1..47: note = Probe
  source 1..47: mol_type = other DNA

SEQ ID NO: 52662 - DNA, 48 bp, synthetic construct; identical to SEQ ID NO: 3532
  misc_feature 1..48: note = Probe
  source 1..48: mol_type = other DNA

SEQ ID NO: 52663 - DNA, 49 bp, synthetic construct; identical to SEQ ID NO: 3533
  misc_feature 1..49: note = Probe
  source 1..49: mol_type = other DNA

SEQ ID NO: 52664 - DNA, 50 bp, synthetic construct; identical to SEQ ID NO: 3534
  misc_feature 1..50: note = Probe
  source 1..50: mol_type = other DNA

SEQ ID NO: 52665 - DNA, 50 bp, synthetic construct; identical to SEQ ID NO: 337
  misc_feature 1..50: note = Probe
  source 1..50: mol_type = other DNA

SEQ ID NO: 52666 - DNA, 23 bp, synthetic construct
  misc_feature 1..23: note = Probe
  source 1..23: mol_type = other DNA
agtactagcagttttgaaacttc

SEQ ID NO: 52667 - DNA, 28 bp, synthetic construct
  misc_feature 1..28: note = Probe
  source 1..28: mol_type = other DNA
agtatccccgcctgtcacgcgggagacc

SEQ ID NO: 52668 - DNA, 29 bp, synthetic construct
  misc_feature 1..29: note = Probe
  source 1..29: mol_type = other DNA
agtatccccgcctgtcacgcgggagaccg

SEQ ID NO: 52669 - DNA, 30 bp, synthetic construct; identical to SEQ ID NO: 12745
  misc_feature 1..30: note = Probe
  source 1..30: mol_type = other DNA

SEQ ID NO: 52670 - DNA, 23 bp, synthetic construct
  misc_feature 1..23: note = Probe
  source 1..23: mol_type = other DNA
agtcagaggttcaattcctcttc

SEQ ID NO: 52671 - DNA, 32 bp, synthetic construct; identical to SEQ ID NO: 3546
  misc_feature 1..32: note = Probe
  source 1..32: mol_type = other DNA

SEQ ID NO: 52672 - DNA, 19 bp, synthetic construct
  misc_feature 1..19: note = Probe
  source 1..19: mol_type = other DNA
agtccgtgcgagaataatg

SEQ ID NO: 52673 - DNA, 19 bp, synthetic construct
  misc_feature 1..19: note = Probe
  source 1..19: mol_type = other DNA
agtcctgccgcggtcgaag

SEQ ID NO: 52674 - DNA, 23 bp, synthetic construct
  misc_feature 1..23: note = Probe
  source 1..23: mol_type = other DNA
agtcggtagagcatcagactttt

SEQ ID NO: 52675 - DNA, 17 bp, synthetic construct
  misc_feature 1..17: note = Probe
  source 1..17: mol_type = other DNA
agtcggtagagcatgag

SEQ ID NO: 52676 - DNA, 18 bp, synthetic construct
  misc_feature 1..18: note = Probe
  source 1..18: mol_type = other DNA
agtcggtagagcatgaga

SEQ ID NO: 52677 - DNA, 19 bp, synthetic construct
  misc_feature 1..19: note = Probe
  source 1..19: mol_type = other DNA
agtcggtagagcatgagac

SEQ ID NO: 52678 - DNA, 21 bp, synthetic construct
  misc_feature 1..21: note = Probe
  source 1..21: mol_type = other DNA
agtcggtagagcatgagactc

SEQ ID NO: 52679 - DNA, 36 bp, synthetic construct; identical to SEQ ID NO: 346
  misc_feature 1..36: note = Probe
  source 1..36: mol_type = other DNA

SEQ ID NO: 52680 - DNA, 20 bp, synthetic construct
  misc_feature 1..20: note = Probe
  source 1..20: mol_type = other DNA
agtcggtagagcatgggact

SEQ ID NO: 52681 - DNA, 27 bp, synthetic construct
  misc_feature 1..27: note = Probe
  source 1..27: mol_type = other DNA
agtcggtagagcatgggactcttaatc

SEQ ID NO: 52682 - DNA, 29 bp, synthetic construct
  misc_feature 1..29: note = Probe
  source 1..29: mol_type = other DNA
agtcggtagagcatgggactcttaatccc

SEQ ID NO: 52683 - DNA, 36 bp, synthetic construct; identical to SEQ ID NO: 354
  misc_feature 1..36: note = Probe
  source 1..36: mol_type = other DNA

SEQ ID NO: 52684 - DNA, 22 bp, synthetic construct
  misc_feature 1..22: note = Probe
  source 1..22: mol_type = other DNA
agtctcataatctgaaggtcct

SEQ ID NO: 52685 - DNA, 23 bp, synthetic construct
  misc_feature 1..23: note = Probe
  source 1..23: mol_type = other DNA
agtctcataatctgaaggtcctg

SEQ ID NO: 52686 - DNA, 24 bp, synthetic construct
  misc_feature 1..24: note = Probe
  source 1..24: mol_type = other DNA
agtctcataatctgaaggtcctga

SEQ ID NO: 52687 - DNA, 25 bp, synthetic construct
  misc_feature 1..25: note = Probe
  source 1..25: mol_type = other DNA
agtctcataatctgaaggtcctgag

SEQ ID NO: 52688 - DNA, 26 bp, synthetic construct
  misc_feature 1..26: note = Probe
  source 1..26: mol_type = other DNA
agtctcataatctgaaggtcctgagt

SEQ ID NO: 52689 - DNA, 27 bp, synthetic construct
  misc_feature 1..27: note = Probe
  source 1..27: mol_type = other DNA
agtctcataatctgaaggtcctgagtt

SEQ ID NO: 52690 - DNA, 21 bp, synthetic construct
  misc_feature 1..21: note = Probe
  source 1..21: mol_type = other DNA
agtctcataatctgaaggtcg

SEQ ID NO: 52691 - DNA, 28 bp, synthetic construct
  misc_feature 1..28: note = Probe
  source 1..28: mol_type = other DNA
agtctcataatctgaaggtcgtgagttc

SEQ ID NO: 52692 - DNA, 29 bp, synthetic construct
  misc_feature 1..29: note = Probe
  source 1..29: mol_type = other DNA
agtctcataatctgaaggtcgtgagttcg

SEQ ID NO: 52693 - DNA, 30 bp, synthetic construct
  misc_feature 1..30: note = Probe
  source 1..30: mol_type = other DNA
agtctcataatctgaaggtcgtgagttcga

SEQ ID NO: 52694 - DNA, 43 bp, synthetic construct; identical to SEQ ID NO: 3569
  misc_feature 1..43: note = Probe
  source 1..43: mol_type = other DNA

SEQ ID NO: 52695 - DNA, 18 bp, synthetic construct
  misc_feature 1..18: note = Probe
  source 1..18: mol_type = other DNA
agtgcacttggacgaacc

SEQ ID NO: 52696 - DNA, 36 bp, synthetic construct; identical to SEQ ID NO: 12756
  misc_feature 1..36: note = Probe
  source 1..36: mol_type = other DNA

SEQ ID NO: 52697 - DNA, 36 bp, synthetic construct; identical to SEQ ID NO: 16927
  misc_feature 1..36: note = Probe
  source 1..36: mol_type = other DNA

SEQ ID NO: 52698 - DNA, 17 bp, synthetic construct
  misc_feature 1..17: note = Probe
  source 1..17: mol_type = other DNA
agtggtagaattctcgc

SEQ ID NO: 52699 - DNA, 18 bp, synthetic construct
  misc_feature 1..18: note = Probe
  source 1..18: mol_type = other DNA
agtggtagaattctcgcc

SEQ ID NO: 52700 - DNA, 19 bp, synthetic construct
  misc_feature 1..19: note = Probe
  source 1..19: mol_type = other DNA
agtggtagaattctcgcct

SEQ ID NO: 52701 - DNA, 20 bp, synthetic construct
  misc_feature 1..20: note = Probe
  source 1..20: mol_type = other DNA
agtggtagaattctcgcctg

SEQ ID NO: 52702 - DNA, 21 bp, synthetic construct
  misc_feature 1..21: note = Probe
  source 1..21: mol_type = other DNA
agtggtagaattctcgcctgc

SEQ ID NO: 52703 - DNA, 22 bp, synthetic construct
  misc_feature 1..22: note = Probe
  source 1..22: mol_type = other DNA
agtggtagaattctcgcctgcc

SEQ ID NO: 52704 - DNA, 17 bp, synthetic construct
  misc_feature 1..17: note = Probe
  source 1..17: mol_type = other DNA
agtggtagagcatttga

SEQ ID NO: 52705 - DNA, 17 bp, synthetic construct
  misc_feature 1..17: note = Probe
  source 1..17: mol_type = other DNA
agtggtagagcgcatgc

SEQ ID NO: 52706 - DNA, 16 bp, synthetic construct
  misc_feature 1..16: note = Probe
  source 1..16: mol_type = other DNA
agtggtatcatgcaag

SEQ ID NO: 52707 - DNA, 17 bp, synthetic construct
  misc_feature 1..17: note = Probe
  source 1..17: mol_type = other DNA
agtggtatcatgcaaga

SEQ ID NO: 52708 - DNA, 26 bp, synthetic construct
  misc_feature 1..26: note = Probe
  source 1..26: mol_type = other DNA
agtggtatcatgcaagattcccattc

SEQ ID NO: 52709 - DNA, 35 bp, synthetic construct
  misc_feature 1..35: note = Probe
  source 1..35: mol_type = other DNA
agtggtatcatgcaagattcccattcttgcgaccc

SEQ ID NO: 52710 - DNA, 36 bp, synthetic construct
  misc_feature 1..36: note = Probe
  source 1..36: mol_type = other DNA
agtggtatcatgcaagattcccattcttgcgacccg

SEQ ID NO: 52711 - DNA, 37 bp, synthetic construct
  misc_feature 1..37: note = Probe
  source 1..37: mol_type = other DNA
agtggtatcatgcaagattcccattcttgcgacccgg

SEQ ID NO: 52712 - DNA, 17 bp, synthetic construct
  misc_feature 1..17: note = Probe
  source 1..17: mol_type = other DNA
agtggtatgattctcgc

SEQ ID NO: 52713 - DNA, 18 bp, synthetic construct
  misc_feature 1..18: note = Probe
  source 1..18: mol_type = other DNA
agtggtatgattctcgct

SEQ ID NO: 52714 - DNA, 36 bp, synthetic construct; identical to SEQ ID NO: 16938
  misc_feature 1..36: note = Probe
  source 1..36: mol_type = other DNA

SEQ ID NO: 52715 - DNA, 16 bp, synthetic construct
  misc_feature 1..16: note = Probe
  source 1..16: mol_type = other DNA
agtggtgagtatcccc

SEQ ID NO: 52716 - DNA, 17 bp, synthetic construct
  misc_feature 1..17: note = Probe
  source 1..17: mol_type = other DNA
agtggtgagtatccccg

SEQ ID NO: 52717 - DNA, 18 bp, synthetic construct
  misc_feature 1..18: note = Probe
  source 1..18: mol_type = other DNA
agtggtgagtatccccgc

SEQ ID NO: 52718 - DNA, 19 bp, synthetic construct
  misc_feature 1..19: note = Probe
  source 1..19: mol_type = other DNA
agtggtgagtatccccgcc

SEQ ID NO: 52719 - DNA, 23 bp, synthetic construct
  misc_feature 1..23: note = Probe
  source 1..23: mol_type = other DNA
agtggtgagtatccccgcctgtc

SEQ ID NO: 52720 - DNA, 24 bp, synthetic construct
  misc_feature 1..24: note = Probe
  source 1..24: mol_type = other DNA
agtggtgagtatccccgcctgtca

SEQ ID NO: 52721 - DNA, 25 bp, synthetic construct
  misc_feature 1..25: note = Probe
  source 1..25: mol_type = other DNA
agtggtgagtatccccgcctgtcac

SEQ ID NO: 52722 - DNA, 26 bp, synthetic construct
  misc_feature 1..26: note = Probe
  source 1..26: mol_type = other DNA
agtggtgagtatccccgcctgtcacg

SEQ ID NO: 52723 - DNA, 27 bp, synthetic construct
  misc_feature 1..27: note = Probe
  source 1..27: mol_type = other DNA
agtggtgagtatccccgcctgtcacgc

SEQ ID NO: 52724 - DNA, 35 bp, synthetic construct; identical to SEQ ID NO: 16948
  misc_feature 1..35: note = Probe
  source 1..35: mol_type = other DNA

SEQ ID NO: 52725 - DNA, 36 bp, synthetic construct; identical to SEQ ID NO: 12765
  misc_feature 1..36: note = Probe
  source 1..36: mol_type = other DNA

SEQ ID NO: 52726 - DNA, 37 bp, synthetic construct; identical to SEQ ID NO: 12766
  misc_feature 1..37: note = Probe
  source 1..37: mol_type = other DNA

SEQ ID NO: 52727 - DNA, 36 bp, synthetic construct; identical to SEQ ID NO: 12768
  misc_feature 1..36: note = Probe
  source 1..36: mol_type = other DNA

SEQ ID NO: 52728 - DNA, 16 bp, synthetic construct
  misc_feature 1..16: note = Probe
  source 1..16: mol_type = other DNA
agtggttaggattcgg

SEQ ID NO: 52729 - DNA, 17 bp, synthetic construct
  misc_feature 1..17: note = Probe
  source 1..17: mol_type = other DNA
agtggttaggattcggc

SEQ ID NO: 52730 - DNA, 21 bp, synthetic construct
  misc_feature 1..21: note = Probe
  source 1..21: mol_type = other DNA
agtggttaggattcggcgctc

SEQ ID NO: 52731 - DNA, 22 bp, synthetic construct
  misc_feature 1..22: note = Probe
  source 1..22: mol_type = other DNA
agtggttaggattcggcgctct

SEQ ID NO: 52732 - DNA, 26 bp, synthetic construct
  misc_feature 1..26: note = Probe
  source 1..26: mol_type = other DNA
agtggttaggattcggcgctctcacc

SEQ ID NO: 52733 - DNA, 28 bp, synthetic construct
  misc_feature 1..28: note = Probe
  source 1..28: mol_type = other DNA
agtggttaggattcggcgctctcaccgc

SEQ ID NO: 52734 - DNA, 30 bp, synthetic construct
  misc_feature 1..30: note = Probe
  source 1..30: mol_type = other DNA
agtggttaggattcggcgctctcaccgccg

SEQ ID NO: 52735 - DNA, 32 bp, synthetic construct; identical to SEQ ID NO: 16957
  misc_feature 1..32: note = Probe
  source 1..32: mol_type = other DNA

SEQ ID NO: 52736 - DNA, 33 bp, synthetic construct; identical to SEQ ID NO: 16958
  misc_feature 1..33: note = Probe
  source 1..33: mol_type = other DNA

SEQ ID NO: 52737 - DNA, 40 bp, synthetic construct; identical to SEQ ID NO: 12779
  misc_feature 1..40: note = Probe
  source 1..40: mol_type = other DNA

SEQ ID NO: 52738 - DNA, 16 bp, synthetic construct
  misc_feature 1..16: note = Probe
  source 1..16: mol_type = other DNA
agtggttagtactctg

SEQ ID NO: 52739 - DNA, 17 bp, synthetic construct
  misc_feature 1..17: note = Probe
  source 1..17: mol_type = other DNA
agtggttagtactctgc

SEQ ID NO: 52740 - DNA, 19 bp, synthetic construct
  misc_feature 1..19: note = Probe
  source 1..19: mol_type = other DNA
agtggttagtactctgcgt

SEQ ID NO: 52741 - DNA, 19 bp, synthetic construct
  misc_feature 1..19: note = Probe
  source 1..19: mol_type = other DNA
agtggttatcacgttcgcc

SEQ ID NO: 52742 - DNA, 41 bp, synthetic construct; identical to SEQ ID NO: 16965
  misc_feature 1..41: note = Probe
  source 1..41: mol_type = other DNA

SEQ ID NO: 52743 - DNA, 25 bp, synthetic construct
  misc_feature 1..25: note = Probe
  source 1..25: mol_type = other DNA
agtggttatcacgttcgcctcacac

SEQ ID NO: 52744 - DNA, 27 bp, synthetic construct
  misc_feature 1..27: note = Probe
  source 1..27: mol_type = other DNA
agtggttatcacgttcgcctcacacgc

SEQ ID NO: 52745 - DNA, 41 bp, synthetic construct; identical to SEQ ID NO: 16968
  misc_feature 1..41: note = Probe
  source 1..41: mol_type = other DNA

SEQ ID NO: 52746 - DNA, 28 bp, synthetic construct
  misc_feature 1..28: note = Probe
  source 1..28: mol_type = other DNA
agtgtttgtgggtttaagtcccattggt

SEQ ID NO: 52747 - DNA, 29 bp, synthetic construct
  misc_feature 1..29: note = Probe
  source 1..29: mol_type = other DNA
agtgtttgtgggtttaagtcccattggtc

SEQ ID NO: 52748 - DNA, 30 bp, synthetic construct; identical to SEQ ID NO: 3599
  misc_feature 1..30: note = Probe
  source 1..30: mol_type = other DNA

SEQ ID NO: 52749 - DNA, 37 bp, synthetic construct; identical to SEQ ID NO: 3604
  misc_feature 1..37: note = Probe
  source 1..37: mol_type = other DNA

SEQ ID NO: 52750 - DNA, 38 bp, synthetic construct; identical to SEQ ID NO: 3605
  misc_feature 1..38: note = Probe
  source 1..38: mol_type = other DNA

SEQ ID NO: 52751 - DNA, 41 bp, synthetic construct; identical to SEQ ID NO: 3608
  misc_feature 1..41: note = Probe
  source 1..41: mol_type = other DNA

SEQ ID NO: 52752 - DNA, 50 bp, synthetic construct; identical to SEQ ID NO: 3610
  misc_feature 1..50: note = Probe
  source 1..50: mol_type = other DNA

SEQ ID NO: 52753 - DNA, 35 bp, synthetic construct; identical to SEQ ID NO: 3616
  misc_feature 1..35: note = Probe
  source 1..35: mol_type = other DNA

SEQ ID NO: 52754 - DNA, 40 bp, synthetic construct
  misc_feature 1..40: note = Probe
  source 1..40: mol_type = other DNA
agttgattagggtgcttagctgttaactaagtgtttgtgg

SEQ ID NO: 52755 - DNA, 44 bp, synthetic construct; identical to SEQ ID NO: 3617
  misc_feature 1..44: note = Probe
  source 1..44: mol_type = other DNA

SEQ ID NO: 52756 - DNA, 45 bp, synthetic construct
  misc_feature 1..45: note = Probe
  source 1..45: mol_type = other DNA
agttgattagggtgcttagctgttaactaagtgtttgtgggttta

SEQ ID NO: 52757 - DNA, 50 bp, synthetic construct; identical to SEQ ID NO: 365
  misc_feature 1..50: note = Probe
  source 1..50: mol_type = other DNA

SEQ ID NO: 52758 - DNA, 37 bp, synthetic construct; identical to SEQ ID NO: 3621
  misc_feature 1..37: note = Probe
  source 1..37: mol_type = other DNA

SEQ ID NO: 52759 - DNA, 23 bp, synthetic construct
  misc_feature 1..23: note = Probe
  source 1..23: mol_type = other DNA
ataacccagaggtcgatggatcg

SEQ ID NO: 52760 - DNA, 24 bp, synthetic construct
  misc_feature 1..24: note = Probe
  source 1..24: mol_type = other DNA
ataacccagaggtcgatggatcga

SEQ ID NO: 52761 - DNA, 42 bp, synthetic construct; identical to SEQ ID NO: 3634
  misc_feature 1..42: note = Probe
  source 1..42: mol_type = other DNA

SEQ ID NO: 52762 - DNA, 41 bp, synthetic construct; identical to SEQ ID NO: 17043
  misc_feature 1..41: note = Probe
  source 1..41: mol_type = other DNA

SEQ ID NO: 52763 - DNA, 42 bp, synthetic construct
  misc_feature 1..42: note = Probe
  source 1..42: mol_type = other DNA
ataacccagaggtcgatggatcgaaaccatcctctgctatcg

SEQ ID NO: 52764 - DNA, 42 bp, synthetic construct
  misc_feature 1..42: note = Probe
  source 1..42: mol_type = other DNA
ataacccagaggtcgatggatcgaaaccatcctctgctattt

SEQ ID NO: 52765 - DNA, 25 bp, synthetic construct
  misc_feature 1..25: note = Probe
  source 1..25: mol_type = other DNA
ataagctatcgggcccataccccga

SEQ ID NO: 52766 - DNA, 27 bp, synthetic construct
  misc_feature 1..27: note = Probe
  source 1..27: mol_type = other DNA
ataagctatcgggcccataccccgaaa

SEQ ID NO: 52767 - DNA, 28 bp, synthetic construct
  misc_feature 1..28: note = Probe
  source 1..28: mol_type = other DNA
ataagctatcgggcccataccccgaaaa

SEQ ID NO: 52768 - DNA, 29 bp, synthetic construct
  misc_feature 1..29: note = Probe
  source 1..29: mol_type = other DNA
ataagctatcgggcccataccccgaaaat

SEQ ID NO: 52769 - DNA, 30 bp, synthetic construct; identical to SEQ ID NO: 3643
  misc_feature 1..30: note = Probe
  source 1..30: mol_type = other DNA

SEQ ID NO: 52770 - DNA, 31 bp, synthetic construct; identical to SEQ ID NO: 3644
  misc_feature 1..31: note = Probe
  source 1..31: mol_type = other DNA

SEQ ID NO: 52771 - DNA, 20 bp, synthetic construct
  misc_feature 1..20: note = Probe
  source 1..20: mol_type = other DNA
ataatcatatttaccaaatg

SEQ ID NO: 52772 - DNA, 50 bp, synthetic construct; identical to SEQ ID NO: 3654
  misc_feature 1..50: note = Probe
  source 1..50: mol_type = other DNA

SEQ ID NO: 52773 - DNA, 29 bp, synthetic construct
  misc_feature 1..29: note = Probe
  source 1..29: mol_type = other DNA
atacccacacccacccaagaacagggttt

SEQ ID NO: 52774 - DNA, 30 bp, synthetic construct; identical to SEQ ID NO: 3660
  misc_feature 1..30: note = Probe
  source 1..30: mol_type = other DNA

SEQ ID NO: 52775 - DNA, 31 bp, synthetic construct; identical to SEQ ID NO: 3661
  misc_feature 1..31: note = Probe
  source 1..31: mol_type = other DNA

SEQ ID NO: 52776 - DNA, 32 bp, synthetic construct; identical to SEQ ID NO: 3662
  misc_feature 1..32: note = Probe
  source 1..32: mol_type = other DNA

SEQ ID NO: 52777 - DNA, 33 bp, synthetic construct; identical to SEQ ID NO: 3663
  misc_feature 1..33: note = Probe
  source 1..33: mol_type = other DNA

SEQ ID NO: 52778 - DNA, 34 bp, synthetic construct; identical to SEQ ID NO: 17095
  misc_feature 1..34: note = Probe
  source 1..34: mol_type = other DNA

SEQ ID NO: 52779 - DNA, 35 bp, synthetic construct
  misc_feature 1..35: note = Probe
  source 1..35: mol_type = other DNA
atacccacacccacccaagaacagggtttgttaag

SEQ ID NO: 52780 - DNA, 36 bp, synthetic construct; identical to SEQ ID NO: 17096
  misc_feature 1..36: note = Probe
  source 1..36: mol_type = other DNA

SEQ ID NO: 52781 - DNA, 30 bp, synthetic construct
  misc_feature 1..30: note = Probe
  source 1..30: mol_type = other DNA
ataccccgaaaatgttggttatacccttcc

SEQ ID NO: 52782 - DNA, 32 bp, synthetic construct; identical to SEQ ID NO: 3664
  misc_feature 1..32: note = Probe
  source 1..32: mol_type = other DNA

SEQ ID NO: 52783 - DNA, 33 bp, synthetic construct
  misc_feature 1..33: note = Probe
  source 1..33: mol_type = other DNA
ataccccgaaaatgttggttatacccttcccgt

SEQ ID NO: 52784 - DNA, 34 bp, synthetic construct; identical to SEQ ID NO: 3665
  misc_feature 1..34: note = Probe
  source 1..34: mol_type = other DNA

SEQ ID NO: 52785 - DNA, 35 bp, synthetic construct
  misc_feature 1..35: note = Probe
  source 1..35: mol_type = other DNA
ataccccgaaaatgttggttatacccttcccgtac

SEQ ID NO: 52786 - DNA, 36 bp, synthetic construct; identical to SEQ ID NO: 17099
  misc_feature 1..36: note = Probe
  source 1..36: mol_type = other DNA

SEQ ID NO: 52787 - DNA, 37 bp, synthetic construct; identical to SEQ ID NO: 12794
  misc_feature 1..37: note = Probe
  source 1..37: mol_type = other DNA

SEQ ID NO: 52788 - DNA, 39 bp, synthetic construct; identical to SEQ ID NO: 3666
  misc_feature 1..39: note = Probe
  source 1..39: mol_type = other DNA

SEQ ID NO: 52789 - DNA, 40 bp, synthetic construct; identical to SEQ ID NO: 3667
  misc_feature 1..40: note = Probe
  source 1..40: mol_type = other DNA

SEQ ID NO: 52790 - DNA, 42 bp, synthetic construct; identical to SEQ ID NO: 3671
  misc_feature 1..42: note = Probe
  source 1..42: mol_type = other DNA

SEQ ID NO: 52791 - DNA, 25 bp, synthetic construct
  misc_feature 1..25: note = Probe
  source 1..25: mol_type = other DNA
atagctcagtcggtagagcatcaga

SEQ ID NO: 52792 - DNA, 27 bp, synthetic construct
  misc_feature 1..27: note = Probe
  source 1..27: mol_type = other DNA
ataggctaaatcctatatatcttaatg

SEQ ID NO: 52793 - DNA, 17 bp, synthetic construct
  misc_feature 1..17: note = Probe
  source 1..17: mol_type = other DNA
ataggtttggtcctagc

SEQ ID NO: 52794 - DNA, 18 bp, synthetic construct
  misc_feature 1..18: note = Probe
  source 1..18: mol_type = other DNA
ataggtttggtcctagcc

SEQ ID NO: 52795 - DNA, 19 bp, synthetic construct
  misc_feature 1..19: note = Probe
  source 1..19: mol_type = other DNA
ataggtttggtcctagcct

SEQ ID NO: 52796 - DNA, 20 bp, synthetic construct
  misc_feature 1..20: note = Probe
  source 1..20: mol_type = other DNA
ataggtttggtcctagcctt

SEQ ID NO: 52797 - DNA, 21 bp, synthetic construct
  misc_feature 1..21: note = Probe
  source 1..21: mol_type = other DNA
ataggtttggtcctagccttt

SEQ ID NO: 52798 - DNA, 22 bp, synthetic construct
  misc_feature 1..22: note = Probe
  source 1..22: mol_type = other DNA
ataggtttggtcctagcctttc

SEQ ID NO: 52799 - DNA, 23 bp, synthetic construct
  misc_feature 1..23: note = Probe
  source 1..23: mol_type = other DNA
ataggtttggtcctagcctttct

SEQ ID NO: 52800 - DNA, 24 bp, synthetic construct
  misc_feature 1..24: note = Probe
  source 1..24: mol_type = other DNA
ataggtttggtcctagcctttcta

SEQ ID NO: 52801 - DNA, 26 bp, synthetic construct
  misc_feature 1..26: note = Probe
  source 1..26: mol_type = other DNA
ataggtttggtcctagcctttctatt

SEQ ID NO: 52802 - DNA, 27 bp, synthetic construct
  misc_feature 1..27: note = Probe
  source 1..27: mol_type = other DNA
ataggtttggtcctagcctttctatta

SEQ ID NO: 52803 - DNA, 29 bp, synthetic construct
  misc_feature 1..29: note = Probe
  source 1..29: mol_type = other DNA
ataggtttggtcctagcctttctattagc

SEQ ID NO: 52804 - DNA, 50 bp, synthetic construct; identical to SEQ ID NO: 3687
  misc_feature 1..50: note = Probe
  source 1..50: mol_type = other DNA

SEQ ID NO: 52805 - DNA, 39 bp, synthetic construct; identical to SEQ ID NO: 3695
  misc_feature 1..39: note = Probe
  source 1..39: mol_type = other DNA

SEQ ID NO: 52806 - DNA, 23 bp, synthetic construct
  misc_feature 1..23: note = Probe
  source 1..23: mol_type = other DNA
atatccaaccttcagctataggg

SEQ ID NO: 52807 - DNA, 24 bp, synthetic construct
  misc_feature 1..24: note = Probe
  source 1..24: mol_type = other DNA
atatccaaccttcagctatagggt

SEQ ID NO: 52808 - DNA, 50 bp, synthetic construct; identical to SEQ ID NO: 3698
  misc_feature 1..50: note = Probe
  source 1..50: mol_type = other DNA

SEQ ID NO: 52809 - DNA, 17 bp, synthetic construct
  misc_feature 1..17: note = Probe
  source 1..17: mol_type = other DNA
atcagaagattccaggt

SEQ ID NO: 52810 - DNA, 17 bp, synthetic construct
  misc_feature 1..17: note = Probe
  source 1..17: mol_type = other DNA
atcagaagattctaggt

SEQ ID NO: 52811 - DNA, 39 bp, synthetic construct; identical to SEQ ID NO: 3707
  misc_feature 1..39: note = Probe
  source 1..39: mol_type = other DNA

SEQ ID NO: 52812 - DNA, 50 bp, synthetic construct; identical to SEQ ID NO: 3714
  misc_feature 1..50: note = Probe
  source 1..50: mol_type = other DNA

SEQ ID NO: 52813 - DNA, 37 bp, synthetic construct; identical to SEQ ID NO: 3718
  misc_feature 1..37: note = Probe
  source 1..37: mol_type = other DNA

SEQ ID NO: 52814 - DNA, 17 bp, synthetic construct
  misc_feature 1..17: note = Probe
  source 1..17: mol_type = other DNA
atccagcgatccgagtt

SEQ ID NO: 52815 - DNA, 19 bp, synthetic construct
  misc_feature 1..19: note = Probe
  source 1..19: mol_type = other DNA
atccagcgatccgagttca

SEQ ID NO: 52816 - DNA, 18 bp, synthetic construct
  misc_feature 1..18: note = Probe
  source 1..18: mol_type = other DNA
atccaggtgccccctccc

SEQ ID NO: 52817 - DNA, 19 bp, synthetic construct
  misc_feature 1..19: note = Probe
  source 1..19: mol_type = other DNA
atccaggtgccccctccct

SEQ ID NO: 52818 - DNA, 21 bp, synthetic construct
  misc_feature 1..21: note = Probe
  source 1..21: mol_type = other DNA
atcccaccgctgccaagtact

SEQ ID NO: 52819 - DNA, 17 bp, synthetic construct
  misc_feature 1..17: note = Probe
  source 1..17: mol_type = other DNA
atcccaccgctgccaca

SEQ ID NO: 52820 - DNA, 18 bp, synthetic construct
  misc_feature 1..18: note = Probe
  source 1..18: mol_type = other DNA
atcccaccgctgccacac

SEQ ID NO: 52821 - DNA, 19 bp, synthetic construct
  misc_feature 1..19: note = Probe
  source 1..19: mol_type = other DNA
atcccaccgctgccacacc

SEQ ID NO: 52822 - DNA, 20 bp, synthetic construct
  misc_feature 1..20: note = Probe
  source 1..20: mol_type = other DNA
atcccaccgctgccacacct

SEQ ID NO: 52823 - DNA, 21 bp, synthetic construct
  misc_feature 1..21: note = Probe
  source 1..21: mol_type = other DNA
atcccaccgctgccacacctc

SEQ ID NO: 52824 - DNA, 22 bp, synthetic construct
  misc_feature 1..22: note = Probe
  source 1..22: mol_type = other DNA
atcccaccgctgccacacctca

SEQ ID NO: 52825 - DNA, 23 bp, synthetic construct
  misc_feature 1..23: note = Probe
  source 1..23: mol_type = other DNA
atcccaccgctgccacacctcag

SEQ ID NO: 52826 - DNA, 20 bp, synthetic construct
  misc_feature 1..20: note = Probe
  source 1..20: mol_type = other DNA
atcccaccgctgccaggtgc

SEQ ID NO: 52827 - DNA, 20 bp, synthetic construct
  misc_feature 1..20: note = Probe
  source 1..20: mol_type = other DNA
atcccaccgctgccaggttt

SEQ ID NO: 52828 - DNA, 21 bp, synthetic construct
  misc_feature 1..21: note = Probe
  source 1..21: mol_type = other DNA
atcccaccgctgccaggttta

SEQ ID NO: 52829 - DNA, 22 bp, synthetic construct
  misc_feature 1..22: note = Probe
  source 1..22: mol_type = other DNA
atcccaccgctgccaggtttat

SEQ ID NO: 52830 - DNA, 23 bp, synthetic construct
  misc_feature 1..23: note = Probe
  source 1..23: mol_type = other DNA
atcccaccgctgccaggtttatt

SEQ ID NO: 52831 - DNA, 18 bp, synthetic construct
  misc_feature 1..18: note = Probe
  source 1..18: mol_type = other DNA
atcccactcctgacagtt

SEQ ID NO: 52832 - DNA, 16 bp, synthetic construct
  misc_feature 1..16: note = Probe
  source 1..16: mol_type = other DNA
atcccacttctgacac

SEQ ID NO: 52833 - DNA, 18 bp, synthetic construct
  misc_feature 1..18: note = Probe
  source 1..18: mol_type = other DNA
atcccagcggtgcctccg

SEQ ID NO: 52834 - DNA, 19 bp, synthetic construct
  misc_feature 1..19: note = Probe
  source 1..19: mol_type = other DNA
atcccatcctcgtcgctcg

SEQ ID NO: 52835 - DNA, 20 bp, synthetic construct
  misc_feature 1..20: note = Probe
  source 1..20: mol_type = other DNA
atcccatcctcgtcgctcgg

SEQ ID NO: 52836 - DNA, 20 bp, synthetic construct
  misc_feature 1..20: note = Probe
  source 1..20: mol_type = other DNA
atccccggcacctccaccag

SEQ ID NO: 52837 - DNA, 21 bp, synthetic construct
  misc_feature 1..21: note = Probe
  source 1..21: mol_type = other DNA
atccccggcacctccaccagt

SEQ ID NO: 52838 - DNA, 22 bp, synthetic construct
  misc_feature 1..22: note = Probe
  source 1..22: mol_type = other DNA
atccccggcacctccaccagtt

SEQ ID NO: 52839 - DNA, 19 bp, synthetic construct
  misc_feature 1..19: note = Probe
  source 1..19: mol_type = other DNA
atccccggcatctccattg

SEQ ID NO: 52840 - DNA, 21 bp, synthetic construct
  misc_feature 1..21: note = Probe
  source 1..21: mol_type = other DNA
atccccggcatctccattgta

SEQ ID NO: 52841 - DNA, 16 bp, synthetic construct
  misc_feature 1..16: note = Probe
  source 1..16: mol_type = other DNA
atcccggacgagcccc

SEQ ID NO: 52842 - DNA, 17 bp, synthetic construct
  misc_feature 1..17: note = Probe
  source 1..17: mol_type = other DNA
atcccggacgagccccc

SEQ ID NO: 52843 - DNA, 18 bp, synthetic construct
  misc_feature 1..18: note = Probe
  source 1..18: mol_type = other DNA
atcccggacgagccccct

SEQ ID NO: 52844 - DNA, 19 bp, synthetic construct
  misc_feature 1..19: note = Probe
  source 1..19: mol_type = other DNA
atcccggacgagccccctt

SEQ ID NO: 52845 - DNA, 20 bp, synthetic construct
  misc_feature 1..20: note = Probe
  source 1..20: mol_type = other DNA
atcccggacgagcccccttt

SEQ ID NO: 52846 - DNA, 21 bp, synthetic construct
  misc_feature 1..21: note = Probe
  source 1..21: mol_type = other DNA
atcccggacgagccccctttt

SEQ ID NO: 52847 - DNA, 17 bp, synthetic construct
  misc_feature 1..17: note = Probe
  source 1..17: mol_type = other DNA
atcccggacgagcccct

SEQ ID NO: 52848 - DNA, 18 bp, synthetic construct
  misc_feature 1..18: note = Probe
  source 1..18: mol_type = other DNA
atcccggacgagcccggt

SEQ ID NO: 52849 - DNA, 20 bp, synthetic construct
  misc_feature 1..20: note = Probe
  source 1..20: mol_type = other DNA
atcccggacgagcccggttt

SEQ ID NO: 52850 - DNA, 22 bp, synthetic construct
  misc_feature 1..22: note = Probe
  source 1..22: mol_type = other DNA
atcccggacgagccctcatttt

SEQ ID NO: 52851 - DNA, 21 bp, synthetic construct
  misc_feature 1..21: note = Probe
  source 1..21: mol_type = other DNA
atcccgggtttcggcacttcc

SEQ ID NO: 52852 - DNA, 20 bp, synthetic construct
  misc_feature 1..20: note = Probe
  source 1..20: mol_type = other DNA
atcccgggtttcggcagcta

SEQ ID NO: 52853 - DNA, 18 bp, synthetic construct
  misc_feature 1..18: note = Probe
  source 1..18: mol_type = other DNA
atccggctcgaaggacga

SEQ ID NO: 52854 - DNA, 19 bp, synthetic construct
  misc_feature 1..19: note = Probe
  source 1..19: mol_type = other DNA
atccggctcgaaggacgaa

SEQ ID NO: 52855 - DNA, 20 bp, synthetic construct
  misc_feature 1..20: note = Probe
  source 1..20: mol_type = other DNA
atccggctcgaaggacgaaa

SEQ ID NO: 52856 - DNA, 16 bp, synthetic construct
  misc_feature 1..16: note = Probe
  source 1..16: mol_type = other DNA
atccgggtgccccctc

SEQ ID NO: 52857 - DNA, 18 bp, synthetic construct
  misc_feature 1..18: note = Probe
  source 1..18: mol_type = other DNA
atccgggtgccccctcaa

SEQ ID NO: 52858 - DNA, 19 bp, synthetic construct
  misc_feature 1..19: note = Probe
  source 1..19: mol_type = other DNA
atccgggtgccccctcaat

SEQ ID NO: 52859 - DNA, 20 bp, synthetic construct
  misc_feature 1..20: note = Probe
  source 1..20: mol_type = other DNA
atccgggtgccccctcaatg

SEQ ID NO: 52860 - DNA, 21 bp, synthetic construct
  misc_feature 1..21: note = Probe
  source 1..21: mol_type = other DNA
atccgggtgccccctcaatgg

SEQ ID NO: 52861 - DNA, 22 bp, synthetic construct
  misc_feature 1..22: note = Probe
  source 1..22: mol_type = other DNA
atccgggtgccccctcaatggc

SEQ ID NO: 52862 - DNA, 18 bp, synthetic construct
  misc_feature 1..18: note = Probe
  source 1..18: mol_type = other DNA
atccgggtgccccctcac

SEQ ID NO: 52863 - DNA, 19 bp, synthetic construct
  misc_feature 1..19: note = Probe
  source 1..19: mol_type = other DNA
atccgggtgccccctcaca

SEQ ID NO: 52864 - DNA, 20 bp, synthetic construct
  misc_feature 1..20: note = Probe
  source 1..20: mol_type = other DNA
atccgggtgccccctcacag

SEQ ID NO: 52865 - DNA, 21 bp, synthetic construct
  misc_feature 1..21: note = Probe
  source 1..21: mol_type = other DNA
atccgggtgccccctcacagc

SEQ ID NO: 52866 - DNA, 22 bp, synthetic construct
  misc_feature 1..22: note = Probe
  source 1..22: mol_type = other DNA
atccgggtgccccctcacagcc

SEQ ID NO: 52867 - DNA, 19 bp, synthetic construct
  misc_feature 1..19: note = Probe
  source 1..19: mol_type = other DNA
atccgggtgccccctcggg

SEQ ID NO: 52868 - DNA, 18 bp, synthetic construct
  misc_feature 1..18: note = Probe
  source 1..18: mol_type = other DNA
atccgggtgccccctctg

SEQ ID NO: 52869 - DNA, 19 bp, synthetic construct
  misc_feature 1..19: note = Probe
  source 1..19: mol_type = other DNA
atccgggtgccccctctgt

SEQ ID NO: 52870 - DNA, 20 bp, synthetic construct
  misc_feature 1..20: note = Probe
  source 1..20: mol_type = other DNA
atccgggtgccccctctgtg

SEQ ID NO: 52871 - DNA, 21 bp, synthetic construct
  misc_feature 1..21: note = Probe
  source 1..21: mol_type = other DNA
atccgggtgccccctctgtgc

SEQ ID NO: 52872 - DNA, 18 bp, synthetic construct
  misc_feature 1..18: note = Probe
  source 1..18: mol_type = other DNA
atccgggtgccccctctt

SEQ ID NO: 52873 - DNA, 19 bp, synthetic construct
  misc_feature 1..19: note = Probe
  source 1..19: mol_type = other DNA
atccgggtgccccctcttt

SEQ ID NO: 52874 - DNA, 19 bp, synthetic construct
  misc_feature 1..19: note = Probe
  source 1..19: mol_type = other DNA
atcctcacacggggcacaa

SEQ ID NO: 52875 - DNA, 18 bp, synthetic construct
  misc_feature 1..18: note = Probe
  source 1..18: mol_type = other DNA
atcctgccgactacgtca

SEQ ID NO: 52876 - DNA, 21 bp, synthetic construct
  misc_feature 1..21: note = Probe
  source 1..21: mol_type = other DNA
atcctgccgactacgtcatat

SEQ ID NO: 52877 - DNA, 29 bp, synthetic construct
  misc_feature 1..29: note = Probe
  source 1..29: mol_type = other DNA
atcgcataaaacttaaaactttacagtca

SEQ ID NO: 52878 - DNA, 49 bp, synthetic construct; identical to SEQ ID NO: 3758
  misc_feature 1..49: note = Probe
  source 1..49: mol_type = other DNA

SEQ ID NO: 52879 - DNA, 50 bp, synthetic construct; identical to SEQ ID NO: 3759
  misc_feature 1..50: note = Probe
  source 1..50: mol_type = other DNA

SEQ ID NO: 52880 - DNA, 28 bp, synthetic construct
  misc_feature 1..28: note = Probe
  source 1..28: mol_type = other DNA
atctaaagacaggggttaggcctctttt

SEQ ID NO: 52881 - DNA, 33 bp, synthetic construct; identical to SEQ ID NO: 387
  misc_feature 1..33: note = Probe
  source 1..33: mol_type = other DNA

SEQ ID NO: 52882 - DNA, 35 bp, synthetic construct; identical to SEQ ID NO: 3765
  misc_feature 1..35: note = Probe
  source 1..35: mol_type = other DNA

SEQ ID NO: 52883 - DNA, 36 bp, synthetic construct; identical to SEQ ID NO: 3766
  misc_feature 1..36: note = Probe
  source 1..36: mol_type = other DNA

SEQ ID NO: 52884 - DNA, 19 bp, synthetic construct
  misc_feature 1..19: note = Probe
  source 1..19: mol_type = other DNA
atctaaaggtccctggttc

SEQ ID NO: 52885 - DNA, 24 bp, synthetic construct
  misc_feature 1..24: note = Probe
  source 1..24: mol_type = other DNA
atctaaaggtccctggttcgatcc

SEQ ID NO: 52886 - DNA, 29 bp, synthetic construct
  misc_feature 1..29: note = Probe
  source 1..29: mol_type = other DNA
atctgacaacagaggcttacgacccctta

SEQ ID NO: 52887 - DNA, 38 bp, synthetic construct; identical to SEQ ID NO: 3792
  misc_feature 1..38: note = Probe
  source 1..38: mol_type = other DNA

SEQ ID NO: 52888 - DNA, 49 bp, synthetic construct; identical to SEQ ID NO: 3796
  misc_feature 1..49: note = Probe
  source 1..49: mol_type = other DNA

SEQ ID NO: 52889 - DNA, 26 bp, synthetic construct
  misc_feature 1..26: note = Probe
  source 1..26: mol_type = other DNA
atgaaaacctttttccaaggacaaat

SEQ ID NO: 52890 - DNA, 29 bp, synthetic construct
  misc_feature 1..29: note = Probe
  source 1..29: mol_type = other DNA
atgattctcgcttagggtgcgagaggtcc

SEQ ID NO: 52891 - DNA, 30 bp, synthetic construct; identical to SEQ ID NO: 17385
  misc_feature 1..30: note = Probe
  source 1..30: mol_type = other DNA

SEQ ID NO: 52892 - DNA, 31 bp, synthetic construct; identical to SEQ ID NO: 3801
  misc_feature 1..31: note = Probe
  source 1..31: mol_type = other DNA

SEQ ID NO: 52893 - DNA, 32 bp, synthetic construct
  misc_feature 1..32: note = Probe
  source 1..32: mol_type = other DNA
atgattctcgcttagggtgcgagaggtcccgg

SEQ ID NO: 52894 - DNA, 29 bp, synthetic construct
  misc_feature 1..29: note = Probe
  source 1..29: mol_type = other DNA
atgattctcgcttcgggtgcgagaggtcc

SEQ ID NO: 52895 - DNA, 30 bp, synthetic construct; identical to SEQ ID NO: 17387
  misc_feature 1..30: note = Probe
  source 1..30: mol_type = other DNA

SEQ ID NO: 52896 - DNA, 31 bp, synthetic construct; identical to SEQ ID NO: 3802
  misc_feature 1..31: note = Probe
  source 1..31: mol_type = other DNA

SEQ ID NO: 52897 - DNA, 32 bp, synthetic construct; identical to SEQ ID NO: 3803
  misc_feature 1..32: note = Probe
  source 1..32: mol_type = other DNA

SEQ ID NO: 52898 - DNA, 29 bp, synthetic construct
  misc_feature 1..29: note = Probe
  source 1..29: mol_type = other DNA
atgattctcgctttgggtgcgagaggtcc

SEQ ID NO: 52899 - DNA, 30 bp, synthetic construct; identical to SEQ ID NO: 12823
  misc_feature 1..30: note = Probe
  source 1..30: mol_type = other DNA

SEQ ID NO: 52900 - DNA, 31 bp, synthetic construct; identical to SEQ ID NO: 3804
  misc_feature 1..31: note = Probe
  source 1..31: mol_type = other DNA

SEQ ID NO: 52901 - DNA, 32 bp, synthetic construct
  misc_feature 1..32: note = Probe
  source 1..32: mol_type = other DNA
atgattctcgctttgggtgcgagaggtcccgg

SEQ ID NO: 52902 - DNA, 30 bp, synthetic construct; identical to SEQ ID NO: 17391
  misc_feature 1..30: note = Probe
  source 1..30: mol_type = other DNA

SEQ ID NO: 52903 - DNA, 31 bp, synthetic construct; identical to SEQ ID NO: 17392
  misc_feature 1..31: note = Probe
  source 1..31: mol_type = other DNA

SEQ ID NO: 52904 - DNA, 44 bp, synthetic construct; identical to SEQ ID NO: 3805
  misc_feature 1..44: note = Probe
  source 1..44: mol_type = other DNA

SEQ ID NO: 52905 - DNA, 30 bp, synthetic construct; identical to SEQ ID NO: 3807
  misc_feature 1..30: note = Probe
  source 1..30: mol_type = other DNA

SEQ ID NO: 52906 - DNA, 23 bp, synthetic construct
  misc_feature 1..23: note = Probe
  source 1..23: mol_type = other DNA
atgccccaactaaatactaccgt

SEQ ID NO: 52907 - DNA, 24 bp, synthetic construct
  misc_feature 1..24: note = Probe
  source 1..24: mol_type = other DNA
atgccccaactaaatactaccgta

SEQ ID NO: 52908 - DNA, 28 bp, synthetic construct
  misc_feature 1..28: note = Probe
  source 1..28: mol_type = other DNA
atgccccaactaaatactaccgtatggc

SEQ ID NO: 52909 - DNA, 26 bp, synthetic construct
  misc_feature 1..26: note = Probe
  source 1..26: mol_type = other DNA
atgcccccatgtctaacaacatggct

SEQ ID NO: 52910 - DNA, 27 bp, synthetic construct
  misc_feature 1..27: note = Probe
  source 1..27: mol_type = other DNA
atgcccccatgtctaacaacatggctt

SEQ ID NO: 52911 - DNA, 28 bp, synthetic construct
  misc_feature 1..28: note = Probe
  source 1..28: mol_type = other DNA
atgcccccatgtctaacaacatggcttt

SEQ ID NO: 52912 - DNA, 29 bp, synthetic construct
  misc_feature 1..29: note = Probe
  source 1..29: mol_type = other DNA
atgcccccatgtctaacaacatggctttc

SEQ ID NO: 52913 - DNA, 30 bp, synthetic construct; identical to SEQ ID NO: 3818
  misc_feature 1..30: note = Probe
  source 1..30: mol_type = other DNA

SEQ ID NO: 52914 - DNA, 31 bp, synthetic construct; identical to SEQ ID NO: 3819
  misc_feature 1..31: note = Probe
  source 1..31: mol_type = other DNA

SEQ ID NO: 52915 - DNA, 32 bp, synthetic construct; identical to SEQ ID NO: 3820
  misc_feature 1..32: note = Probe
  source 1..32: mol_type = other DNA

SEQ ID NO: 52916 - DNA, 33 bp, synthetic construct; identical to SEQ ID NO: 3821
  misc_feature 1..33: note = Probe
  source 1..33: mol_type = other DNA

SEQ ID NO: 52917 - DNA, 34 bp, synthetic construct; identical to SEQ ID NO: 3822
  misc_feature 1..34: note = Probe
  source 1..34: mol_type = other DNA

SEQ ID NO: 52918 - DNA, 35 bp, synthetic construct; identical to SEQ ID NO: 3823
  misc_feature 1..35: note = Probe
  source 1..35: mol_type = other DNA

SEQ ID NO: 52919 - DNA, 30 bp, synthetic construct; identical to SEQ ID NO: 3841
  misc_feature 1..30: note = Probe
  source 1..30: mol_type = other DNA

SEQ ID NO: 52920 - DNA, 16 bp, synthetic construct
  misc_feature 1..16: note = Probe
  source 1..16: mol_type = other DNA
atggtagagcgctcgc

SEQ ID NO: 52921 - DNA, 16 bp, synthetic construct
  misc_feature 1..16: note = Probe
  source 1..16: mol_type = other DNA
atggttagcactctgg

SEQ ID NO: 52922 - DNA, 17 bp, synthetic construct
  misc_feature 1..17: note = Probe
  source 1..17: mol_type = other DNA
atggttagcactctgga

SEQ ID NO: 52923 - DNA, 35 bp, synthetic construct
  misc_feature 1..35: note = Probe
  source 1..35: mol_type = other DNA
atggttagcactctggactctgaatccagcgatcc

SEQ ID NO: 52924 - DNA, 39 bp, synthetic construct; identical to SEQ ID NO: 17472
  misc_feature 1..39: note = Probe
  source 1..39: mol_type = other DNA

SEQ ID NO: 52925 - DNA, 40 bp, synthetic construct; identical to SEQ ID NO: 28901
  misc_feature 1..40: note = Probe
  source 1..40: mol_type = other DNA

SEQ ID NO: 52926 - DNA, 39 bp, synthetic construct; identical to SEQ ID NO: 28907
  misc_feature 1..39: note = Probe
  source 1..39: mol_type = other DNA

SEQ ID NO: 52927 - DNA, 40 bp, synthetic construct; identical to SEQ ID NO: 28908
  misc_feature 1..40: note = Probe
  source 1..40: mol_type = other DNA

SEQ ID NO: 52928 - DNA, 26 bp, synthetic construct
  misc_feature 1..26: note = Probe
  source 1..26: mol_type = other DNA
atgtctaacaacatggctttctcaac

SEQ ID NO: 52929 - DNA, 27 bp, synthetic construct
  misc_feature 1..27: note = Probe
  source 1..27: mol_type = other DNA
atgtctaacaacatggctttctcaact

SEQ ID NO: 52930 - DNA, 19 bp, synthetic construct
  misc_feature 1..19: note = Probe
  source 1..19: mol_type = other DNA
atgtttagacgggctcaca

SEQ ID NO: 52931 - DNA, 25 bp, synthetic construct
  misc_feature 1..25: note = Probe
  source 1..25: mol_type = other DNA
atgtttagacgggctcacatcaccc

SEQ ID NO: 52932 - DNA, 26 bp, synthetic construct
  misc_feature 1..26: note = Probe
  source 1..26: mol_type = other DNA
atgtttagacgggctcacatcacccc

SEQ ID NO: 52933 - DNA, 27 bp, synthetic construct
  misc_feature 1..27: note = Probe
  source 1..27: mol_type = other DNA
atgtttagacgggctcacatcacccca

SEQ ID NO: 52934 - DNA, 29 bp, synthetic construct
  misc_feature 1..29: note = Probe
  source 1..29: mol_type = other DNA
atgtttagacgggctcacatcaccccata

SEQ ID NO: 52935 - DNA, 36 bp, synthetic construct; identical to SEQ ID NO: 3867
  misc_feature 1..36: note = Probe
  source 1..36: mol_type = other DNA

SEQ ID NO: 52936 - DNA, 38 bp, synthetic construct; identical to SEQ ID NO: 3869
  misc_feature 1..38: note = Probe
  source 1..38: mol_type = other DNA

SEQ ID NO: 52937 - DNA, 33 bp, synthetic construct; identical to SEQ ID NO: 3873
  misc_feature 1..33: note = Probe
  source 1..33: mol_type = other DNA

SEQ ID NO: 52938 - DNA, 50 bp, synthetic construct; identical to SEQ ID NO: 420
  misc_feature 1..50: note = Probe
  source 1..50: mol_type = other DNA

SEQ ID NO: 52939 - DNA, 18 bp, synthetic construct
  misc_feature 1..18: note = Probe
  source 1..18: mol_type = other DNA
attcccattcttgcgacc

SEQ ID NO: 52940 - DNA, 19 bp, synthetic construct
  misc_feature 1..19: note = Probe
  source 1..19: mol_type = other DNA
attcccattcttgcgaccc

SEQ ID NO: 52941 - DNA, 20 bp, synthetic construct
  misc_feature 1..20: note = Probe
  source 1..20: mol_type = other DNA
attcccattcttgcgacccg

SEQ ID NO: 52942 - DNA, 24 bp, synthetic construct
  misc_feature 1..24: note = Probe
  source 1..24: mol_type = other DNA
attcccattcttgcgacccgggtt

SEQ ID NO: 52943 - DNA, 25 bp, synthetic construct
  misc_feature 1..25: note = Probe
  source 1..25: mol_type = other DNA
attcccattcttgcgacccgggttc

SEQ ID NO: 52944 - DNA, 28 bp, synthetic construct
  misc_feature 1..28: note = Probe
  source 1..28: mol_type = other DNA
attcccattcttgcgacccgggttcgat

SEQ ID NO: 52945 - DNA, 44 bp, synthetic construct
  misc_feature 1..44: note = Probe
  source 1..44: mol_type = other DNA
attcccattcttgcgacccgggttcgattcccgggcggcgcact

SEQ ID NO: 52946 - DNA, 45 bp, synthetic construct; identical to SEQ ID NO: 17522
  misc_feature 1..45: note = Probe
  source 1..45: mol_type = other DNA

SEQ ID NO: 52947 - DNA, 50 bp, synthetic construct; identical to SEQ ID NO: 38673
  misc_feature 1..50: note = Probe
  source 1..50: mol_type = other DNA

SEQ ID NO: 52948 - DNA, 19 bp, synthetic construct
  misc_feature 1..19: note = Probe
  source 1..19: mol_type = other DNA
attcccggccaacgcaagt

SEQ ID NO: 52949 - DNA, 19 bp, synthetic construct
  misc_feature 1..19: note = Probe
  source 1..19: mol_type = other DNA
attcccggccaacgcagtg

SEQ ID NO: 52950 - DNA, 19 bp, synthetic construct
  misc_feature 1..19: note = Probe
  source 1..19: mol_type = other DNA
attcccggcccatgcagca

SEQ ID NO: 52951 - DNA, 33 bp, synthetic construct; identical to SEQ ID NO: 3885
  misc_feature 1..33: note = Probe
  source 1..33: mol_type = other DNA

SEQ ID NO: 52952 - DNA, 37 bp, synthetic construct; identical to SEQ ID NO: 3888
  misc_feature 1..37: note = Probe
  source 1..37: mol_type = other DNA

SEQ ID NO: 52953 - DNA, 38 bp, synthetic construct; identical to SEQ ID NO: 3893
  misc_feature 1..38: note = Probe
  source 1..38: mol_type = other DNA

SEQ ID NO: 52954 - DNA, 19 bp, synthetic construct
  misc_feature 1..19: note = Probe
  source 1..19: mol_type = other DNA
attctcatagtcctagaaa

SEQ ID NO: 52955 - DNA, 30 bp, synthetic construct; identical to SEQ ID NO: 17540
  misc_feature 1..30: note = Probe
  source 1..30: mol_type = other DNA

SEQ ID NO: 52956 - DNA, 38 bp, synthetic construct; identical to SEQ ID NO: 3895
  misc_feature 1..38: note = Probe
  source 1..38: mol_type = other DNA

SEQ ID NO: 52957 - DNA, 39 bp, synthetic construct; identical to SEQ ID NO: 3896
  misc_feature 1..39: note = Probe
  source 1..39: mol_type = other DNA

SEQ ID NO: 52958 - DNA, 40 bp, synthetic construct; identical to SEQ ID NO: 3903
  misc_feature 1..40: note = Probe
  source 1..40: mol_type = other DNA

SEQ ID NO: 52959 - DNA, 43 bp, synthetic construct; identical to SEQ ID NO: 3905
  misc_feature 1..43: note = Probe
  source 1..43: mol_type = other DNA

SEQ ID NO: 52960 - DNA, 44 bp, synthetic construct; identical to SEQ ID NO: 3906
  misc_feature 1..44: note = Probe
  source 1..44: mol_type = other DNA

SEQ ID NO: 52961 - DNA, 34 bp, synthetic construct; identical to SEQ ID NO: 3911
  misc_feature 1..34: note = Probe
  source 1..34: mol_type = other DNA

SEQ ID NO: 52962 - DNA, 45 bp, synthetic construct; identical to SEQ ID NO: 3932
  misc_feature 1..45: note = Probe
  source 1..45: mol_type = other DNA

SEQ ID NO: 52963 - DNA, 29 bp, synthetic construct
  misc_feature 1..29: note = Probe
  source 1..29: mol_type = other DNA
atttcaacttaacttgaccgctctgagct

SEQ ID NO: 52964 - DNA, 26 bp, synthetic construct
  misc_feature 1..26: note = Probe
  source 1..26: mol_type = other DNA
caaaacatcagattgtgaatctgaca

SEQ ID NO: 52965 - DNA, 28 bp, synthetic construct
  misc_feature 1..28: note = Probe
  source 1..28: mol_type = other DNA
caaaacatcagattgtgaatctgacaac

SEQ ID NO: 52966 - DNA, 29 bp, synthetic construct
  misc_feature 1..29: note = Probe
  source 1..29: mol_type = other DNA
caaaacatcagattgtgaatctgacaaca

SEQ ID NO: 52967 - DNA, 45 bp, synthetic construct; identical to SEQ ID NO: 435
  misc_feature 1..45: note = Probe
  source 1..45: mol_type = other DNA

SEQ ID NO: 52968 - DNA, 49 bp, synthetic construct; identical to SEQ ID NO: 3955
  misc_feature 1..49: note = Probe
  source 1..49: mol_type = other DNA

SEQ ID NO: 52969 - DNA, 49 bp, synthetic construct; identical to SEQ ID NO: 3957
  misc_feature 1..49: note = Probe
  source 1..49: mol_type = other DNA

SEQ ID NO: 52970 - DNA, 50 bp, synthetic construct; identical to SEQ ID NO: 3958
  misc_feature 1..50: note = Probe
  source 1..50: mol_type = other DNA

SEQ ID NO: 52971 - DNA, 16 bp, synthetic construct
  misc_feature 1..16: note = Probe
  source 1..16: mol_type = other DNA
caaacccactccacct

SEQ ID NO: 52972 - DNA, 39 bp, synthetic construct; identical to SEQ ID NO: 17620
  misc_feature 1..39: note = Probe
  source 1..39: mol_type = other DNA

SEQ ID NO: 52973 - DNA, 38 bp, synthetic construct; identical to SEQ ID NO: 440
  misc_feature 1..38: note = Probe
  source 1..38: mol_type = other DNA

SEQ ID NO: 52974 - DNA, 50 bp, synthetic construct; identical to SEQ ID NO: 442
  misc_feature 1..50: note = Probe
  source 1..50: mol_type = other DNA

SEQ ID NO: 52975 - DNA, 27 bp, synthetic construct
  misc_feature 1..27: note = Probe
  source 1..27: mol_type = other DNA
caaagcacccaacttacacttaggaga

SEQ ID NO: 52976 - DNA, 31 bp, synthetic construct; identical to SEQ ID NO: 3988
  misc_feature 1..31: note = Probe
  source 1..31: mol_type = other DNA

SEQ ID NO: 52977 - DNA, 21 bp, synthetic construct
  misc_feature 1..21: note = Probe
  source 1..21: mol_type = other DNA
caaatcccggacgagccccct

SEQ ID NO: 52978 - DNA, 22 bp, synthetic construct
  misc_feature 1..22: note = Probe
  source 1..22: mol_type = other DNA
caaatcccggacgagccccctt

SEQ ID NO: 52979 - DNA, 23 bp, synthetic construct
  misc_feature 1..23: note = Probe
  source 1..23: mol_type = other DNA
caaatcccggacgagcccccttt

SEQ ID NO: 52980 - DNA, 22 bp, synthetic construct
  misc_feature 1..22: note = Probe
  source 1..22: mol_type = other DNA
caaatcccggacgagccctcat

SEQ ID NO: 52981 - DNA, 23 bp, synthetic construct
  misc_feature 1..23: note = Probe
  source 1..23: mol_type = other DNA
caaatcccggacgagccctcatt

SEQ ID NO: 52982 - DNA, 21 bp, synthetic construct
  misc_feature 1..21: note = Probe
  source 1..21: mol_type = other DNA
caaatccgggtgccccctcaa

SEQ ID NO: 52983 - DNA, 38 bp, synthetic construct; identical to SEQ ID NO: 17648
  misc_feature 1..38: note = Probe
  source 1..38: mol_type = other DNA

SEQ ID NO: 52984 - DNA, 39 bp, synthetic construct; identical to SEQ ID NO: 3994
  misc_feature 1..39: note = Probe
  source 1..39: mol_type = other DNA

SEQ ID NO: 52985 - DNA, 40 bp, synthetic construct; identical to SEQ ID NO: 3995
  misc_feature 1..40: note = Probe
  source 1..40: mol_type = other DNA

SEQ ID NO: 52986 - DNA, 22 bp, synthetic construct
  misc_feature 1..22: note = Probe
  source 1..22: mol_type = other DNA
caacacctctttacagtgaaat

SEQ ID NO: 52987 - DNA, 30 bp, synthetic construct; identical to SEQ ID NO: 4001
  misc_feature 1..30: note = Probe
  source 1..30: mol_type = other DNA

SEQ ID NO: 52988 - DNA, 31 bp, synthetic construct; identical to SEQ ID NO: 4002
  misc_feature 1..31: note = Probe
  source 1..31: mol_type = other DNA

SEQ ID NO: 52989 - DNA, 32 bp, synthetic construct; identical to SEQ ID NO: 4003
  misc_feature 1..32: note = Probe
  source 1..32: mol_type = other DNA

SEQ ID NO: 52990 - DNA, 24 bp, synthetic construct
  misc_feature 1..24: note = Probe
  source 1..24: mol_type = other DNA
caaccgagcgtccaagctctttcc

SEQ ID NO: 52991 - DNA, 25 bp, synthetic construct
  misc_feature 1..25: note = Probe
  source 1..25: mol_type = other DNA
caaccgagcgtccaagctctttcca

SEQ ID NO: 52992 - DNA, 23 bp, synthetic construct
  misc_feature 1..23: note = Probe
  source 1..23: mol_type = other DNA
caacttaacttgaccgctctgag

SEQ ID NO: 52993 - DNA, 24 bp, synthetic construct
  misc_feature 1..24: note = Probe
  source 1..24: mol_type = other DNA
caacttaacttgaccgctctgagc

SEQ ID NO: 52994 - DNA, 25 bp, synthetic construct
  misc_feature 1..25: note = Probe
  source 1..25: mol_type = other DNA
caacttaacttgaccgctctgagct

SEQ ID NO: 52995 - DNA, 37 bp, synthetic construct; identical to SEQ ID NO: 4026
  misc_feature 1..37: note = Probe
  source 1..37: mol_type = other DNA

SEQ ID NO: 52996 - DNA, 44 bp, synthetic construct; identical to SEQ ID NO: 4030
  misc_feature 1..44: note = Probe
  source 1..44: mol_type = other DNA

SEQ ID NO: 52997 - DNA, 45 bp, synthetic construct; identical to SEQ ID NO: 4031
  misc_feature 1..45: note = Probe
  source 1..45: mol_type = other DNA

SEQ ID NO: 52998 - DNA, 46 bp, synthetic construct; identical to SEQ ID NO: 4032
  misc_feature 1..46: note = Probe
  source 1..46: mol_type = other DNA

SEQ ID NO: 52999 - DNA, 18 bp, synthetic construct
  misc_feature 1..18: note = Probe
  source 1..18: mol_type = other DNA
caagaacagggtttgtta

SEQ ID NO: 53000 - DNA, 19 bp, synthetic construct
  misc_feature 1..19: note = Probe
  source 1..19: mol_type = other DNA
caagaactgctaactcatg

SEQ ID NO: 53001 - DNA, 31 bp, synthetic construct; identical to SEQ ID NO: 4039
  misc_feature 1..31: note = Probe
  source 1..31: mol_type = other DNA

SEQ ID NO: 53002 - DNA, 42 bp, synthetic construct; identical to SEQ ID NO: 449
  misc_feature 1..42: note = Probe
  source 1..42: mol_type = other DNA

SEQ ID NO: 53003 - DNA, 43 bp, synthetic construct; identical to SEQ ID NO: 4041
  misc_feature 1..43: note = Probe
  source 1..43: mol_type = other DNA

SEQ ID NO: 53004 - DNA, 44 bp, synthetic construct; identical to SEQ ID NO: 450
  misc_feature 1..44: note = Probe
  source 1..44: mol_type = other DNA

SEQ ID NO: 53005 - DNA, 45 bp, synthetic construct; identical to SEQ ID NO: 451
  misc_feature 1..45: note = Probe
  source 1..45: mol_type = other DNA

SEQ ID NO: 53006 - DNA, 46 bp, synthetic construct; identical to SEQ ID NO: 452
  misc_feature 1..46: note = Probe
  source 1..46: mol_type = other DNA

SEQ ID NO: 53007 - DNA, 50 bp, synthetic construct; identical to SEQ ID NO: 4044
  misc_feature 1..50: note = Probe
  source 1..50: mol_type = other DNA

SEQ ID NO: 53008 - DNA, 31 bp, synthetic construct; identical to SEQ ID NO: 457
  misc_feature 1..31: note = Probe
  source 1..31: mol_type = other DNA

SEQ ID NO: 53009 - DNA, 19 bp, synthetic construct
  misc_feature 1..19: note = Probe
  source 1..19: mol_type = other DNA
caatggataacgcgtctga

SEQ ID NO: 53010 - DNA, 18 bp, synthetic construct
  misc_feature 1..18: note = Probe
  source 1..18: mol_type = other DNA
caatggatagcgcattgg

SEQ ID NO: 53011 - DNA, 19 bp, synthetic construct
  misc_feature 1..19: note = Probe
  source 1..19: mol_type = other DNA
caatggatagcgcattgga

SEQ ID NO: 53012 - DNA, 39 bp, synthetic construct; identical to SEQ ID NO: 4061
  misc_feature 1..39: note = Probe
  source 1..39: mol_type = other DNA

SEQ ID NO: 53013 - DNA, 50 bp, synthetic construct; identical to SEQ ID NO: 462
  misc_feature 1..50: note = Probe
  source 1..50: mol_type = other DNA

SEQ ID NO: 53014 - DNA, 21 bp, synthetic construct
  misc_feature 1..21: note = Probe
  source 1..21: mol_type = other DNA
cacaagaactgctaactcatg

SEQ ID NO: 53015 - DNA, 50 bp, synthetic construct; identical to SEQ ID NO: 466
  misc_feature 1..50: note = Probe
  source 1..50: mol_type = other DNA

SEQ ID NO: 53016 - DNA, 25 bp, synthetic construct
  misc_feature 1..25: note = Probe
  source 1..25: mol_type = other DNA
cacacccacccaagaacagggtttg

SEQ ID NO: 53017 - DNA, 26 bp, synthetic construct
  misc_feature 1..26: note = Probe
  source 1..26: mol_type = other DNA
cacacccacccaagaacagggtttgt

SEQ ID NO: 53018 - DNA, 27 bp, synthetic construct
  misc_feature 1..27: note = Probe
  source 1..27: mol_type = other DNA
cacacccacccaagaacagggtttgtt

SEQ ID NO: 53019 - DNA, 28 bp, synthetic construct
  misc_feature 1..28: note = Probe
  source 1..28: mol_type = other DNA
cacacccacccaagaacagggtttgtta

SEQ ID NO: 53020 - DNA, 21 bp, synthetic construct
  misc_feature 1..21: note = Probe
  source 1..21: mol_type = other DNA
cacacgcgaaaggtccccggt

SEQ ID NO: 53021 - DNA, 21 bp, synthetic construct
  misc_feature 1..21: note = Probe
  source 1..21: mol_type = other DNA
cacatcaccccataaacaaat

SEQ ID NO: 53022 - DNA, 19 bp, synthetic construct
  misc_feature 1..19: note = Probe
  source 1..19: mol_type = other DNA
cacgcgaaaggtccccggt

SEQ ID NO: 53023 - DNA, 40 bp, synthetic construct; identical to SEQ ID NO: 4155
  misc_feature 1..40: note = Probe
  source 1..40: mol_type = other DNA

SEQ ID NO: 53024 - DNA, 28 bp, synthetic construct
  misc_feature 1..28: note = Probe
  source 1..28: mol_type = other DNA
cactctggactctgaatccagcgatccg

SEQ ID NO: 53025 - DNA, 27 bp, synthetic construct
  misc_feature 1..27: note = Probe
  source 1..27: mol_type = other DNA
cactctggactttgaatccagcgatcc

SEQ ID NO: 53026 - DNA, 27 bp, synthetic construct
  misc_feature 1..27: note = Probe
  source 1..27: mol_type = other DNA
cactgtaaagctaacttagcattaacc

SEQ ID NO: 53027 - DNA, 29 bp, synthetic construct
  misc_feature 1..29: note = Probe
  source 1..29: mol_type = other DNA
cactgtaaagctaacttagcattaacctt

SEQ ID NO: 53028 - DNA, 31 bp, synthetic construct; identical to SEQ ID NO: 494
  misc_feature 1..31: note = Probe
  source 1..31: mol_type = other DNA

SEQ ID NO: 53029 - DNA, 33 bp, synthetic construct; identical to SEQ ID NO: 4180
  misc_feature 1..33: note = Probe
  source 1..33: mol_type = other DNA

SEQ ID NO: 53030 - DNA, 35 bp, synthetic construct; identical to SEQ ID NO: 497
  misc_feature 1..35: note = Probe
  source 1..35: mol_type = other DNA

SEQ ID NO: 53031 - DNA, 36 bp, synthetic construct; identical to SEQ ID NO: 498
  misc_feature 1..36: note = Probe
  source 1..36: mol_type = other DNA

SEQ ID NO: 53032 - DNA, 37 bp, synthetic construct; identical to SEQ ID NO: 4181
  misc_feature 1..37: note = Probe
  source 1..37: mol_type = other DNA

SEQ ID NO: 53033 - DNA, 38 bp, synthetic construct; identical to SEQ ID NO: 17810
  misc_feature 1..38: note = Probe
  source 1..38: mol_type = other DNA

SEQ ID NO: 53034 - DNA, 39 bp, synthetic construct; identical to SEQ ID NO: 499
  misc_feature 1..39: note = Probe
  source 1..39: mol_type = other DNA

SEQ ID NO: 53035 - DNA, 40 bp, synthetic construct; identical to SEQ ID NO: 4182
  misc_feature 1..40: note = Probe
  source 1..40: mol_type = other DNA

SEQ ID NO: 53036 - DNA, 43 bp, synthetic construct; identical to SEQ ID NO: 501
  misc_feature 1..43: note = Probe
  source 1..43: mol_type = other DNA

SEQ ID NO: 53037 - DNA, 50 bp, synthetic construct; identical to SEQ ID NO: 502
  misc_feature 1..50: note = Probe
  source 1..50: mol_type = other DNA

SEQ ID NO: 53038 - DNA, 38 bp, synthetic construct; identical to SEQ ID NO: 4203
  misc_feature 1..38: note = Probe
  source 1..38: mol_type = other DNA

SEQ ID NO: 53039 - DNA, 39 bp, synthetic construct; identical to SEQ ID NO: 4204
  misc_feature 1..39: note = Probe
  source 1..39: mol_type = other DNA

SEQ ID NO: 53040 - DNA, 16 bp, synthetic construct
  misc_feature 1..16: note = Probe
  source 1..16: mol_type = other DNA
cagaagattccaggtt

SEQ ID NO: 53041 - DNA, 16 bp, synthetic construct
  misc_feature 1..16: note = Probe
  source 1..16: mol_type = other DNA
cagaagattctaggtt

SEQ ID NO: 53042 - DNA, 37 bp, synthetic construct; identical to SEQ ID NO: 4213
  misc_feature 1..37: note = Probe
  source 1..37: mol_type = other DNA

SEQ ID NO: 53043 - DNA, 16 bp, synthetic construct
  misc_feature 1..16: note = Probe
  source 1..16: mol_type = other DNA
cagaagattgagggtt

SEQ ID NO: 53044 - DNA, 16 bp, synthetic construct
  misc_feature 1..16: note = Probe
  source 1..16: mol_type = other DNA
cagaagattgcaggtt

SEQ ID NO: 53045 - DNA, 50 bp, synthetic construct; identical to SEQ ID NO: 514
  misc_feature 1..50: note = Probe
  source 1..50: mol_type = other DNA

SEQ ID NO: 53046 - DNA, 21 bp, synthetic construct
  misc_feature 1..21: note = Probe
  source 1..21: mol_type = other DNA
cagagaatagtttaaattaga

SEQ ID NO: 53047 - DNA, 25 bp, synthetic construct
  misc_feature 1..25: note = Probe
  source 1..25: mol_type = other DNA
cagagaatagtttaaattagaatct

SEQ ID NO: 53048 - DNA, 26 bp, synthetic construct
  misc_feature 1..26: note = Probe
  source 1..26: mol_type = other DNA
cagagaatagtttaaattagaatctt

SEQ ID NO: 53049 - DNA, 27 bp, synthetic construct
  misc_feature 1..27: note = Probe
  source 1..27: mol_type = other DNA
cagagaatagtttaaattagaatctta

SEQ ID NO: 53050 - DNA, 29 bp, synthetic construct
  misc_feature 1..29: note = Probe
  source 1..29: mol_type = other DNA
cagagaatagtttaaattagaatcttagc

SEQ ID NO: 53051 - DNA, 31 bp, synthetic construct; identical to SEQ ID NO: 520
  misc_feature 1..31: note = Probe
  source 1..31: mol_type = other DNA

SEQ ID NO: 53052 - DNA, 33 bp, synthetic construct; identical to SEQ ID NO: 522
  misc_feature 1..33: note = Probe
  source 1..33: mol_type = other DNA

SEQ ID NO: 53053 - DNA, 34 bp, synthetic construct; identical to SEQ ID NO: 523
  misc_feature 1..34: note = Probe
  source 1..34: mol_type = other DNA

SEQ ID NO: 53054 - DNA, 35 bp, synthetic construct; identical to SEQ ID NO: 4232
  misc_feature 1..35: note = Probe
  source 1..35: mol_type = other DNA

SEQ ID NO: 53055 - DNA, 36 bp, synthetic construct; identical to SEQ ID NO: 4233
  misc_feature 1..36: note = Probe
  source 1..36: mol_type = other DNA

SEQ ID NO: 53056 - DNA, 37 bp, synthetic construct; identical to SEQ ID NO: 4234
  misc_feature 1..37: note = Probe
  source 1..37: mol_type = other DNA

SEQ ID NO: 53057 - DNA, 38 bp, synthetic construct; identical to SEQ ID NO: 4235
  misc_feature 1..38: note = Probe
  source 1..38: mol_type = other DNA

SEQ ID NO: 53058 - DNA, 39 bp, synthetic construct; identical to SEQ ID NO: 4236
  misc_feature 1..39: note = Probe
  source 1..39: mol_type = other DNA

SEQ ID NO: 53059 - DNA, 40 bp, synthetic construct; identical to SEQ ID NO: 524
  misc_feature 1..40: note = Probe
  source 1..40: mol_type = other DNA

SEQ ID NO: 53060 - DNA, 43 bp, synthetic construct; identical to SEQ ID NO: 525
  misc_feature 1..43: note = Probe
  source 1..43: mol_type = other DNA

SEQ ID NO: 53061 - DNA, 44 bp, synthetic construct; identical to SEQ ID NO: 4237
  misc_feature 1..44: note = Probe
  source 1..44: mol_type = other DNA

SEQ ID NO: 53062 - DNA, 45 bp, synthetic construct; identical to SEQ ID NO: 4238
  misc_feature 1..45: note = Probe
  source 1..45: mol_type = other DNA

SEQ ID NO: 53063 - DNA, 46 bp, synthetic construct; identical to SEQ ID NO: 4239
  misc_feature 1..46: note = Probe
  source 1..46: mol_type = other DNA

SEQ ID NO: 53064 - DNA, 50 bp, synthetic construct; identical to SEQ ID NO: 526
  misc_feature 1..50: note = Probe
  source 1..50: mol_type = other DNA

SEQ ID NO: 53065 - DNA, 27 bp, synthetic construct
  misc_feature 1..27: note = Probe
  source 1..27: mol_type = other DNA
cagagtggggttttgcagtccttagct

SEQ ID NO: 53066 - DNA, 16 bp, synthetic construct
  misc_feature 1..16: note = Probe
  source 1..16: mol_type = other DNA
cagagtgtagcttaac

SEQ ID NO: 53067 - DNA, 17 bp, synthetic construct
  misc_feature 1..17: note = Probe
  source 1..17: mol_type = other DNA
cagagtgtagcttaaca

SEQ ID NO: 53068 - DNA, 19 bp, synthetic construct
  misc_feature 1..19: note = Probe
  source 1..19: mol_type = other DNA
cagagtgtagcttaacaca

SEQ ID NO: 53069 - DNA, 21 bp, synthetic construct
  misc_feature 1..21: note = Probe
  source 1..21: mol_type = other DNA
cagagtgtagcttaacacaaa

SEQ ID NO: 53070 - DNA, 23 bp, synthetic construct
  misc_feature 1..23: note = Probe
  source 1..23: mol_type = other DNA
cagagtgtagcttaacacaaagc

SEQ ID NO: 53071 - DNA, 24 bp, synthetic construct
  misc_feature 1..24: note = Probe
  source 1..24: mol_type = other DNA
cagagtgtagcttaacacaaagca

SEQ ID NO: 53072 - DNA, 25 bp, synthetic construct
  misc_feature 1..25: note = Probe
  source 1..25: mol_type = other DNA
cagagtgtagcttaacacaaagcac

SEQ ID NO: 53073 - DNA, 26 bp, synthetic construct
  misc_feature 1..26: note = Probe
  source 1..26: mol_type = other DNA
cagagtgtagcttaacacaaagcacc

SEQ ID NO: 53074 - DNA, 27 bp, synthetic construct
  misc_feature 1..27: note = Probe
  source 1..27: mol_type = other DNA
cagagtgtagcttaacacaaagcaccc

SEQ ID NO: 53075 - DNA, 28 bp, synthetic construct
  misc_feature 1..28: note = Probe
  source 1..28: mol_type = other DNA
cagagtgtagcttaacacaaagcaccca

SEQ ID NO: 53076 - DNA, 29 bp, synthetic construct
  misc_feature 1..29: note = Probe
  source 1..29: mol_type = other DNA
cagagtgtagcttaacacaaagcacccaa

SEQ ID NO: 53077 - DNA, 30 bp, synthetic construct; identical to SEQ ID NO: 4262
  misc_feature 1..30: note = Probe
  source 1..30: mol_type = other DNA

SEQ ID NO: 53078 - DNA, 31 bp, synthetic construct; identical to SEQ ID NO: 4263
  misc_feature 1..31: note = Probe
  source 1..31: mol_type = other DNA

SEQ ID NO: 53079 - DNA, 32 bp, synthetic construct; identical to SEQ ID NO: 4264
  misc_feature 1..32: note = Probe
  source 1..32: mol_type = other DNA

SEQ ID NO: 53080 - DNA, 33 bp, synthetic construct; identical to SEQ ID NO: 4265
  misc_feature 1..33: note = Probe
  source 1..33: mol_type = other DNA

SEQ ID NO: 53081 - DNA, 34 bp, synthetic construct; identical to SEQ ID NO: 4266
  misc_feature 1..34: note = Probe
  source 1..34: mol_type = other DNA

SEQ ID NO: 53082 - DNA, 35 bp, synthetic construct; identical to SEQ ID NO: 4267
  misc_feature 1..35: note = Probe
  source 1..35: mol_type = other DNA

SEQ ID NO: 53083 - DNA, 36 bp, synthetic construct; identical to SEQ ID NO: 4268
  misc_feature 1..36: note = Probe
  source 1..36: mol_type = other DNA

SEQ ID NO: 53084 - DNA, 37 bp, synthetic construct; identical to SEQ ID NO: 4269
  misc_feature 1..37: note = Probe
  source 1..37: mol_type = other DNA

SEQ ID NO: 53085 - DNA, 38 bp, synthetic construct; identical to SEQ ID NO: 4270
  misc_feature 1..38: note = Probe
  source 1..38: mol_type = other DNA

SEQ ID NO: 53086 - DNA, 39 bp, synthetic construct; identical to SEQ ID NO: 4271
  misc_feature 1..39: note = Probe
  source 1..39: mol_type = other DNA

SEQ ID NO: 53087 - DNA, 40 bp, synthetic construct; identical to SEQ ID NO: 4272
  misc_feature 1..40: note = Probe
  source 1..40: mol_type = other DNA

SEQ ID NO: 53088 - DNA, 41 bp, synthetic construct; identical to SEQ ID NO: 4273
  misc_feature 1..41: note = Probe
  source 1..41: mol_type = other DNA

SEQ ID NO: 53089 - DNA, 42 bp, synthetic construct; identical to SEQ ID NO: 4274
  misc_feature 1..42: note = Probe
  source 1..42: mol_type = other DNA

SEQ ID NO: 53090 - DNA, 43 bp, synthetic construct; identical to SEQ ID NO: 4275
  misc_feature 1..43: note = Probe
  source 1..43: mol_type = other DNA

SEQ ID NO: 53091 - DNA, 44 bp, synthetic construct; identical to SEQ ID NO: 4276
  misc_feature 1..44: note = Probe
  source 1..44: mol_type = other DNA

SEQ ID NO: 53092 - DNA, 45 bp, synthetic construct; identical to SEQ ID NO: 4277
  misc_feature 1..45: note = Probe
  source 1..45: mol_type = other DNA

SEQ ID NO: 53093 - DNA, 46 bp, synthetic construct; identical to SEQ ID NO: 4278
  misc_feature 1..46: note = Probe
  source 1..46: mol_type = other DNA

SEQ ID NO: 53094 - DNA, 50 bp, synthetic construct; identical to SEQ ID NO: 4281
  misc_feature 1..50: note = Probe
  source 1..50: mol_type = other DNA

SEQ ID NO: 53095 - DNA, 50 bp, synthetic construct; identical to SEQ ID NO: 4284
  misc_feature 1..50: note = Probe
  source 1..50: mol_type = other DNA

SEQ ID NO: 53096 - DNA, 27 bp, synthetic construct
  misc_feature 1..27: note = Probe
  source 1..27: mol_type = other DNA
cagcctccggagctggggattgtgggt

SEQ ID NO: 53097 - DNA, 26 bp, synthetic construct
  misc_feature 1..26: note = Probe
  source 1..26: mol_type = other DNA
cagctaaataagctatcgggcccata

SEQ ID NO: 53098 - DNA, 27 bp, synthetic construct
  misc_feature 1..27: note = Probe
  source 1..27: mol_type = other DNA
cagctaaataagctatcgggcccatac

SEQ ID NO: 53099 - DNA, 31 bp, synthetic construct; identical to SEQ ID NO: 4307
  misc_feature 1..31: note = Probe
  source 1..31: mol_type = other DNA

SEQ ID NO: 53100 - DNA, 35 bp, synthetic construct; identical to SEQ ID NO: 4311
  misc_feature 1..35: note = Probe
  source 1..35: mol_type = other DNA

SEQ ID NO: 53101 - DNA, 36 bp, synthetic construct; identical to SEQ ID NO: 4312
  misc_feature 1..36: note = Probe
  source 1..36: mol_type = other DNA

SEQ ID NO: 53102 - DNA, 37 bp, synthetic construct; identical to SEQ ID NO: 4313
  misc_feature 1..37: note = Probe
  source 1..37: mol_type = other DNA

SEQ ID NO: 53103 - DNA, 38 bp, synthetic construct; identical to SEQ ID NO: 17944
  misc_feature 1..38: note = Probe
  source 1..38: mol_type = other DNA

SEQ ID NO: 53104 - DNA, 39 bp, synthetic construct; identical to SEQ ID NO: 4314
  misc_feature 1..39: note = Probe
  source 1..39: mol_type = other DNA

SEQ ID NO: 53105 - DNA, 40 bp, synthetic construct; identical to SEQ ID NO: 4315
  misc_feature 1..40: note = Probe
  source 1..40: mol_type = other DNA

SEQ ID NO: 53106 - DNA, 44 bp, synthetic construct; identical to SEQ ID NO: 4318
  misc_feature 1..44: note = Probe
  source 1..44: mol_type = other DNA

SEQ ID NO: 53107 - DNA, 50 bp, synthetic construct; identical to SEQ ID NO: 532
  misc_feature 1..50: note = Probe
  source 1..50: mol_type = other DNA

SEQ ID NO: 53108 - DNA, 15 bp, synthetic construct
  misc_feature 1..15: note = Probe
  source 1..15: mol_type = other DNA
cagctatccattggt

SEQ ID NO: 53109 - DNA, 48 bp, synthetic construct
  misc_feature 1..48: note = Probe
  source 1..48: mol_type = other DNA
cagctatccattggtcttaggccccaaaaattttggtgcaactccaaa

SEQ ID NO: 53110 - DNA, 18 bp, synthetic construct
  misc_feature 1..18: note = Probe
  source 1..18: mol_type = other DNA
cagctttggggggttcga

SEQ ID NO: 53111 - DNA, 29 bp, synthetic construct
  misc_feature 1..29: note = Probe
  source 1..29: mol_type = other DNA
cagctttggggggttcgattccttccttt

SEQ ID NO: 53112 - DNA, 33 bp, synthetic construct; identical to SEQ ID NO: 4334
  misc_feature 1..33: note = Probe
  source 1..33: mol_type = other DNA

SEQ ID NO: 53113 - DNA, 34 bp, synthetic construct; identical to SEQ ID NO: 4335
  misc_feature 1..34: note = Probe
  source 1..34: mol_type = other DNA

SEQ ID NO: 53114 - DNA, 35 bp, synthetic construct; identical to SEQ ID NO: 4336
  misc_feature 1..35: note = Probe
  source 1..35: mol_type = other DNA

SEQ ID NO: 53115 - DNA, 36 bp, synthetic construct; identical to SEQ ID NO: 4337
  misc_feature 1..36: note = Probe
  source 1..36: mol_type = other DNA

SEQ ID NO: 53116 - DNA, 33 bp, synthetic construct; identical to SEQ ID NO: 4345
  misc_feature 1..33: note = Probe
  source 1..33: mol_type = other DNA

SEQ ID NO: 53117 - DNA, 24 bp, synthetic construct
  misc_feature 1..24: note = Probe
  source 1..24: mol_type = other DNA
cagtcagaggttcaattcctcttc

SEQ ID NO: 53118 - DNA, 25 bp, synthetic construct
  misc_feature 1..25: note = Probe
  source 1..25: mol_type = other DNA
cagtcagaggttcaattcctcttct

SEQ ID NO: 53119 - DNA, 26 bp, synthetic construct
  misc_feature 1..26: note = Probe
  source 1..26: mol_type = other DNA
cagtcagaggttcaattcctcttctt

SEQ ID NO: 53120 - DNA, 27 bp, synthetic construct
  misc_feature 1..27: note = Probe
  source 1..27: mol_type = other DNA
cagtcagaggttcaattcctcttctta

SEQ ID NO: 53121 - DNA, 30 bp, synthetic construct; identical to SEQ ID NO: 4358
  misc_feature 1..30: note = Probe
  source 1..30: mol_type = other DNA

SEQ ID NO: 53122 - DNA, 33 bp, synthetic construct; identical to SEQ ID NO: 4360
  misc_feature 1..33: note = Probe
  source 1..33: mol_type = other DNA

SEQ ID NO: 53123 - DNA, 19 bp, synthetic construct
  misc_feature 1..19: note = Probe
  source 1..19: mol_type = other DNA
cagtcggtagagcatcaga

SEQ ID NO: 53124 - DNA, 19 bp, synthetic construct
  misc_feature 1..19: note = Probe
  source 1..19: mol_type = other DNA
cagtcggtagagcatggga

SEQ ID NO: 53125 - DNA, 20 bp, synthetic construct
  misc_feature 1..20: note = Probe
  source 1..20: mol_type = other DNA
cagtcggtagagcatgggac

SEQ ID NO: 53126 - DNA, 30 bp, synthetic construct; identical to SEQ ID NO: 25154
  misc_feature 1..30: note = Probe
  source 1..30: mol_type = other DNA

SEQ ID NO: 53127 - DNA, 37 bp, synthetic construct; identical to SEQ ID NO: 4370
  misc_feature 1..37: note = Probe
  source 1..37: mol_type = other DNA

SEQ ID NO: 53128 - DNA, 42 bp, synthetic construct; identical to SEQ ID NO: 18017
  misc_feature 1..42: note = Probe
  source 1..42: mol_type = other DNA

SEQ ID NO: 53129 - DNA, 27 bp, synthetic construct
  misc_feature 1..27: note = Probe
  source 1..27: mol_type = other DNA
cagtctcataatctgaaggtcctgagt

SEQ ID NO: 53130 - DNA, 24 bp, synthetic construct
  misc_feature 1..24: note = Probe
  source 1..24: mol_type = other DNA
cagtctcataatctgaaggtcgtg

SEQ ID NO: 53131 - DNA, 29 bp, synthetic construct
  misc_feature 1..29: note = Probe
  source 1..29: mol_type = other DNA
cagtctcataatctgaaggtcgtgagttc

SEQ ID NO: 53132 - DNA, 44 bp, synthetic construct; identical to SEQ ID NO: 4374
  misc_feature 1..44: note = Probe
  source 1..44: mol_type = other DNA

SEQ ID NO: 53133 - DNA, 19 bp, synthetic construct
  misc_feature 1..19: note = Probe
  source 1..19: mol_type = other DNA
cagtggtagaattctcgcc

SEQ ID NO: 53134 - DNA, 20 bp, synthetic construct
  misc_feature 1..20: note = Probe
  source 1..20: mol_type = other DNA
cagtggtagaattctcgcct

SEQ ID NO: 53135 - DNA, 21 bp, synthetic construct
  misc_feature 1..21: note = Probe
  source 1..21: mol_type = other DNA
cagtggtagaattctcgcctg

SEQ ID NO: 53136 - DNA, 22 bp, synthetic construct
  misc_feature 1..22: note = Probe
  source 1..22: mol_type = other DNA
cagtggtagaattctcgcctgc

SEQ ID NO: 53137 - DNA, 23 bp, synthetic construct
  misc_feature 1..23: note = Probe
  source 1..23: mol_type = other DNA
cagtggtagaattctcgcctgcc

SEQ ID NO: 53138 - DNA, 36 bp, synthetic construct; identical to SEQ ID NO: 4381
  misc_feature 1..36: note = Probe
  source 1..36: mol_type = other DNA

SEQ ID NO: 53139 - DNA, 45 bp, synthetic construct; identical to SEQ ID NO: 29643
  misc_feature 1..45: note = Probe
  source 1..45: mol_type = other DNA

SEQ ID NO: 53140 - DNA, 50 bp, synthetic construct; identical to SEQ ID NO: 538
  misc_feature 1..50: note = Probe
  source 1..50: mol_type = other DNA

SEQ ID NO: 53141 - DNA, 23 bp, synthetic construct
  misc_feature 1..23: note = Probe
  source 1..23: mol_type = other DNA
cataacccagaggtcgatggatc

SEQ ID NO: 53142 - DNA, 24 bp, synthetic construct
  misc_feature 1..24: note = Probe
  source 1..24: mol_type = other DNA
cataacccagaggtcgatggatcg

SEQ ID NO: 53143 - DNA, 39 bp, synthetic construct
  misc_feature 1..39: note = Probe
  source 1..39: mol_type = other DNA
cataacccagaggtcgatggatcgaaaccatcctctgct

SEQ ID NO: 53144 - DNA, 43 bp, synthetic construct; identical to SEQ ID NO: 4391
  misc_feature 1..43: note = Probe
  source 1..43: mol_type = other DNA

SEQ ID NO: 53145 - DNA, 42 bp, synthetic construct; identical to SEQ ID NO: 18044
  misc_feature 1..42: note = Probe
  source 1..42: mol_type = other DNA

SEQ ID NO: 53146 - DNA, 43 bp, synthetic construct
  misc_feature 1..43: note = Probe
  source 1..43: mol_type = other DNA
cataacccagaggtcgatggatcgaaaccatcctctgctatcg

SEQ ID NO: 53147 - DNA, 42 bp, synthetic construct
  misc_feature 1..42: note = Probe
  source 1..42: mol_type = other DNA
cataacccagaggtcgatggatcgaaaccatcctctgctatt

SEQ ID NO: 53148 - DNA, 43 bp, synthetic construct
  misc_feature 1..43: note = Probe
  source 1..43: mol_type = other DNA
cataacccagaggtcgatggatcgaaaccatcctctgctattt

SEQ ID NO: 53149 - DNA, 21 bp, synthetic construct
  misc_feature 1..21: note = Probe
  source 1..21: mol_type = other DNA
cataatctgaaggtcctgagt

SEQ ID NO: 53150 - DNA, 41 bp, synthetic construct; identical to SEQ ID NO: 4397
  misc_feature 1..41: note = Probe
  source 1..41: mol_type = other DNA

SEQ ID NO: 53151 - DNA, 40 bp, synthetic construct; identical to SEQ ID NO: 18062
  misc_feature 1..40: note = Probe
  source 1..40: mol_type = other DNA

SEQ ID NO: 53152 - DNA, 50 bp, synthetic construct; identical to SEQ ID NO: 4406
  misc_feature 1..50: note = Probe
  source 1..50: mol_type = other DNA

SEQ ID NO: 53153 - DNA, 50 bp, synthetic construct; identical to SEQ ID NO: 4419
  misc_feature 1..50: note = Probe
  source 1..50: mol_type = other DNA

SEQ ID NO: 53154 - DNA, 19 bp, synthetic construct
  misc_feature 1..19: note = Probe
  source 1..19: mol_type = other DNA
catgcaagattcccattct

SEQ ID NO: 53155 - DNA, 27 bp, synthetic construct
  misc_feature 1..27: note = Probe
  source 1..27: mol_type = other DNA
catgcaagattcccattcttgcgaccc

SEQ ID NO: 53156 - DNA, 32 bp, synthetic construct; identical to SEQ ID NO: 18083
  misc_feature 1..32: note = Probe
  source 1..32: mol_type = other DNA

SEQ ID NO: 53157 - DNA, 33 bp, synthetic construct; identical to SEQ ID NO: 18084
  misc_feature 1..33: note = Probe
  source 1..33: mol_type = other DNA

SEQ ID NO: 53158 - DNA, 21 bp, synthetic construct
  misc_feature 1..21: note = Probe
  source 1..21: mol_type = other DNA
catgcccccatgtctaacaac

SEQ ID NO: 53159 - DNA, 26 bp, synthetic construct
  misc_feature 1..26: note = Probe
  source 1..26: mol_type = other DNA
catgcccccatgtctaacaacatggc

SEQ ID NO: 53160 - DNA, 27 bp, synthetic construct
  misc_feature 1..27: note = Probe
  source 1..27: mol_type = other DNA
catgcccccatgtctaacaacatggct

SEQ ID NO: 53161 - DNA, 28 bp, synthetic construct
  misc_feature 1..28: note = Probe
  source 1..28: mol_type = other DNA
catgcccccatgtctaacaacatggctt

SEQ ID NO: 53162 - DNA, 29 bp, synthetic construct
  misc_feature 1..29: note = Probe
  source 1..29: mol_type = other DNA
catgcccccatgtctaacaacatggcttt

SEQ ID NO: 53163 - DNA, 30 bp, synthetic construct; identical to SEQ ID NO: 4433
  misc_feature 1..30: note = Probe
  source 1..30: mol_type = other DNA

SEQ ID NO: 53164 - DNA, 31 bp, synthetic construct; identical to SEQ ID NO: 4434
  misc_feature 1..31: note = Probe
  source 1..31: mol_type = other DNA

SEQ ID NO: 53165 - DNA, 32 bp, synthetic construct; identical to SEQ ID NO: 4435
  misc_feature 1..32: note = Probe
  source 1..32: mol_type = other DNA

SEQ ID NO: 53166 - DNA, 33 bp, synthetic construct; identical to SEQ ID NO: 4436
  misc_feature 1..33: note = Probe
  source 1..33: mol_type = other DNA

SEQ ID NO: 53167 - DNA, 34 bp, synthetic construct; identical to SEQ ID NO: 4437
  misc_feature 1..34: note = Probe
  source 1..34: mol_type = other DNA

SEQ ID NO: 53168 - DNA, 35 bp, synthetic construct; identical to SEQ ID NO: 4438
  misc_feature 1..35: note = Probe
  source 1..35: mol_type = other DNA

SEQ ID NO: 53169 - DNA, 36 bp, synthetic construct; identical to SEQ ID NO: 4439
  misc_feature 1..36: note = Probe
  source 1..36: mol_type = other DNA

SEQ ID NO: 53170 - DNA, 37 bp, synthetic construct; identical to SEQ ID NO: 18101
  misc_feature 1..37: note = Probe
  source 1..37: mol_type = other DNA

SEQ ID NO: 53171 - DNA, 38 bp, synthetic construct; identical to SEQ ID NO: 18102
  misc_feature 1..38: note = Probe
  source 1..38: mol_type = other DNA

SEQ ID NO: 53172 - DNA, 39 bp, synthetic construct; identical to SEQ ID NO: 18103
  misc_feature 1..39: note = Probe
  source 1..39: mol_type = other DNA

SEQ ID NO: 53173 - DNA, 31 bp, synthetic construct; identical to SEQ ID NO: 18105
  misc_feature 1..31: note = Probe
  source 1..31: mol_type = other DNA

SEQ ID NO: 53174 - DNA, 33 bp, synthetic construct; identical to SEQ ID NO: 4440
  misc_feature 1..33: note = Probe
  source 1..33: mol_type = other DNA

SEQ ID NO: 53175 - DNA, 32 bp, synthetic construct; identical to SEQ ID NO: 4447
  misc_feature 1..32: note = Probe
  source 1..32: mol_type = other DNA

SEQ ID NO: 53176 - DNA, 38 bp, synthetic construct; identical to SEQ ID NO: 18118
  misc_feature 1..38: note = Probe
  source 1..38: mol_type = other DNA

SEQ ID NO: 53177 - DNA, 39 bp, synthetic construct; identical to SEQ ID NO: 4450
  misc_feature 1..39: note = Probe
  source 1..39: mol_type = other DNA

SEQ ID NO: 53178 - DNA, 40 bp, synthetic construct; identical to SEQ ID NO: 4451
  misc_feature 1..40: note = Probe
  source 1..40: mol_type = other DNA

SEQ ID NO: 53179 - DNA, 42 bp, synthetic construct; identical to SEQ ID NO: 46375
  misc_feature 1..42: note = Probe
  source 1..42: mol_type = other DNA

SEQ ID NO: 53180 - DNA, 40 bp, synthetic construct; identical to SEQ ID NO: 4455
  misc_feature 1..40: note = Probe
  source 1..40: mol_type = other DNA

SEQ ID NO: 53181 - DNA, 35 bp, synthetic construct; identical to SEQ ID NO: 4461
  misc_feature 1..35: note = Probe
  source 1..35: mol_type = other DNA

SEQ ID NO: 53182 - DNA, 30 bp, synthetic construct; identical to SEQ ID NO: 4462
  misc_feature 1..30: note = Probe
  source 1..30: mol_type = other DNA

SEQ ID NO: 53183 - DNA, 31 bp, synthetic construct; identical to SEQ ID NO: 4463
  misc_feature 1..31: note = Probe
  source 1..31: mol_type = other DNA

SEQ ID NO: 53184 - DNA, 32 bp, synthetic construct; identical to SEQ ID NO: 4464
  misc_feature 1..32: note = Probe
  source 1..32: mol_type = other DNA

SEQ ID NO: 53185 - DNA, 34 bp, synthetic construct; identical to SEQ ID NO: 4466
  misc_feature 1..34: note = Probe
  source 1..34: mol_type = other DNA

SEQ ID NO: 53186 - DNA, 50 bp, synthetic construct; identical to SEQ ID NO: 18141
  misc_feature 1..50: note = Probe
  source 1..50: mol_type = other DNA

SEQ ID NO: 53187 - DNA, 30 bp, synthetic construct; identical to SEQ ID NO: 25171
  misc_feature 1..30: note = Probe
  source 1..30: mol_type = other DNA

SEQ ID NO: 53188 - DNA, 27 bp, synthetic construct
  misc_feature 1..27: note = Probe
  source 1..27: mol_type = other DNA
ccaaaacatcagattgtgaatctgaca

SEQ ID NO: 53189 - DNA, 29 bp, synthetic construct
  misc_feature 1..29: note = Probe
  source 1..29: mol_type = other DNA
ccaaaacatcagattgtgaatctgacaac

SEQ ID NO: 53190 - DNA, 30 bp, synthetic construct; identical to SEQ ID NO: 4473
  misc_feature 1..30: note = Probe
  source 1..30: mol_type = other DNA

SEQ ID NO: 53191 - DNA, 31 bp, synthetic construct; identical to SEQ ID NO: 4474
  misc_feature 1..31: note = Probe
  source 1..31: mol_type = other DNA

SEQ ID NO: 53192 - DNA, 32 bp, synthetic construct; identical to SEQ ID NO: 4475
  misc_feature 1..32: note = Probe
  source 1..32: mol_type = other DNA

SEQ ID NO: 53193 - DNA, 36 bp, synthetic construct; identical to SEQ ID NO: 4479
  misc_feature 1..36: note = Probe
  source 1..36: mol_type = other DNA

SEQ ID NO: 53194 - DNA, 50 bp, synthetic construct; identical to SEQ ID NO: 4482
  misc_feature 1..50: note = Probe
  source 1..50: mol_type = other DNA

SEQ ID NO: 53195 - DNA, 17 bp, synthetic construct
  misc_feature 1..17: note = Probe
  source 1..17: mol_type = other DNA
ccaaacccactccacct

SEQ ID NO: 53196 - DNA, 38 bp, synthetic construct; identical to SEQ ID NO: 18167
  misc_feature 1..38: note = Probe
  source 1..38: mol_type = other DNA

SEQ ID NO: 53197 - DNA, 39 bp, synthetic construct
  misc_feature 1..39: note = Probe
  source 1..39: mol_type = other DNA
ccaaagacaccccccacagtttatgtagcttacctcctc

SEQ ID NO: 53198 - DNA, 23 bp, synthetic construct
  misc_feature 1..23: note = Probe
  source 1..23: mol_type = other DNA
ccaacacctctttacagtgaaat

SEQ ID NO: 53199 - DNA, 45 bp, synthetic construct; identical to SEQ ID NO: 4506
  misc_feature 1..45: note = Probe
  source 1..45: mol_type = other DNA

SEQ ID NO: 53200 - DNA, 46 bp, synthetic construct; identical to SEQ ID NO: 4507
  misc_feature 1..46: note = Probe
  source 1..46: mol_type = other DNA

SEQ ID NO: 53201 - DNA, 48 bp, synthetic construct; identical to SEQ ID NO: 4508
  misc_feature 1..48: note = Probe
  source 1..48: mol_type = other DNA

SEQ ID NO: 53202 - DNA, 49 bp, synthetic construct; identical to SEQ ID NO: 4509
  misc_feature 1..49: note = Probe
  source 1..49: mol_type = other DNA

SEQ ID NO: 53203 - DNA, 50 bp, synthetic construct; identical to SEQ ID NO: 4510
  misc_feature 1..50: note = Probe
  source 1..50: mol_type = other DNA

SEQ ID NO: 53204 - DNA, 19 bp, synthetic construct
  misc_feature 1..19: note = Probe
  source 1..19: mol_type = other DNA
ccaagaacagggtttgtta

SEQ ID NO: 53205 - DNA, 21 bp, synthetic construct
  misc_feature 1..21: note = Probe
  source 1..21: mol_type = other DNA
ccaagcagttgacccgggttc

SEQ ID NO: 53206 - DNA, 41 bp, synthetic construct; identical to SEQ ID NO: 18192
  misc_feature 1..41: note = Probe
  source 1..41: mol_type = other DNA

SEQ ID NO: 53207 - DNA, 38 bp, synthetic construct; identical to SEQ ID NO: 4520
  misc_feature 1..38: note = Probe
  source 1..38: mol_type = other DNA

SEQ ID NO: 53208 - DNA, 39 bp, synthetic construct; identical to SEQ ID NO: 4521
  misc_feature 1..39: note = Probe
  source 1..39: mol_type = other DNA

SEQ ID NO: 53209 - DNA, 40 bp, synthetic construct; identical to SEQ ID NO: 4522
  misc_feature 1..40: note = Probe
  source 1..40: mol_type = other DNA

SEQ ID NO: 53210 - DNA, 26 bp, synthetic construct
  misc_feature 1..26: note = Probe
  source 1..26: mol_type = other DNA
ccacacccacccaagaacagggtttg

SEQ ID NO: 53211 - DNA, 27 bp, synthetic construct
  misc_feature 1..27: note = Probe
  source 1..27: mol_type = other DNA
ccacacccacccaagaacagggtttgt

SEQ ID NO: 53212 - DNA, 28 bp, synthetic construct
  misc_feature 1..28: note = Probe
  source 1..28: mol_type = other DNA
ccacacccacccaagaacagggtttgtt

SEQ ID NO: 53213 - DNA, 29 bp, synthetic construct
  misc_feature 1..29: note = Probe
  source 1..29: mol_type = other DNA
ccacacccacccaagaacagggtttgtta

SEQ ID NO: 53214 - DNA, 25 bp, synthetic construct
  misc_feature 1..25: note = Probe
  source 1..25: mol_type = other DNA
ccacatggtctagcggttaggattc

SEQ ID NO: 53215 - DNA, 26 bp, synthetic construct
  misc_feature 1..26: note = Probe
  source 1..26: mol_type = other DNA
ccacatggtctagcggttaggattcc

SEQ ID NO: 53216 - DNA, 23 bp, synthetic construct
  misc_feature 1..23: note = Probe
  source 1..23: mol_type = other DNA
ccacccaagaacagggtttgtta

SEQ ID NO: 53217 - DNA, 26 bp, synthetic construct
  misc_feature 1..26: note = Probe
  source 1..26: mol_type = other DNA
ccacccaagaacagggtttgttaaga

SEQ ID NO: 53218 - DNA, 21 bp, synthetic construct
  misc_feature 1..21: note = Probe
  source 1..21: mol_type = other DNA
ccacgcgggaggcccgggttc

SEQ ID NO: 53219 - DNA, 22 bp, synthetic construct
  misc_feature 1..22: note = Probe
  source 1..22: mol_type = other DNA
ccacgcgggaggcccgggttcg

SEQ ID NO: 53220 - DNA, 24 bp, synthetic construct
  misc_feature 1..24: note = Probe
  source 1..24: mol_type = other DNA
ccacgcgggaggcccgggttcgat

SEQ ID NO: 53221 - DNA, 38 bp, synthetic construct; identical to SEQ ID NO: 18234
  misc_feature 1..38: note = Probe
  source 1..38: mol_type = other DNA

SEQ ID NO: 53222 - DNA, 41 bp, synthetic construct; identical to SEQ ID NO: 4534
  misc_feature 1..41: note = Probe
  source 1..41: mol_type = other DNA

SEQ ID NO: 53223 - DNA, 22 bp, synthetic construct
  misc_feature 1..22: note = Probe
  source 1..22: mol_type = other DNA
ccacgcgggaggcccgggtttg

SEQ ID NO: 53224 - DNA, 50 bp, synthetic construct; identical to SEQ ID NO: 18241
  misc_feature 1..50: note = Probe
  source 1..50: mol_type = other DNA

SEQ ID NO: 53225 - DNA, 33 bp, synthetic construct; identical to SEQ ID NO: 46473
  misc_feature 1..33: note = Probe
  source 1..33: mol_type = other DNA

SEQ ID NO: 53226 - DNA, 29 bp, synthetic construct
  misc_feature 1..29: note = Probe
  source 1..29: mol_type = other DNA
ccagagtgtagcttaacacaaagcaccca

SEQ ID NO: 53227 - DNA, 46 bp, synthetic construct; identical to SEQ ID NO: 4548
  misc_feature 1..46: note = Probe
  source 1..46: mol_type = other DNA

SEQ ID NO: 53228 - DNA, 35 bp, synthetic construct; identical to SEQ ID NO: 4558
  misc_feature 1..35: note = Probe
  source 1..35: mol_type = other DNA

SEQ ID NO: 53229 - DNA, 37 bp, synthetic construct; identical to SEQ ID NO: 4560
  misc_feature 1..37: note = Probe
  source 1..37: mol_type = other DNA

SEQ ID NO: 53230 - DNA, 38 bp, synthetic construct; identical to SEQ ID NO: 18270
  misc_feature 1..38: note = Probe
  source 1..38: mol_type = other DNA

SEQ ID NO: 53231 - DNA, 45 bp, synthetic construct; identical to SEQ ID NO: 4573
  misc_feature 1..45: note = Probe
  source 1..45: mol_type = other DNA

SEQ ID NO: 53232 - DNA, 50 bp, synthetic construct; identical to SEQ ID NO: 4574
  misc_feature 1..50: note = Probe
  source 1..50: mol_type = other DNA

SEQ ID NO: 53233 - DNA, 44 bp, synthetic construct; identical to SEQ ID NO: 4575
  misc_feature 1..44: note = Probe
  source 1..44: mol_type = other DNA

SEQ ID NO: 53234 - DNA, 43 bp, synthetic construct
  misc_feature 1..43: note = Probe
  source 1..43: mol_type = other DNA
ccataacccagaggtcgatggatcgaaaccatcctctgctatc

SEQ ID NO: 53235 - DNA, 44 bp, synthetic construct
  misc_feature 1..44: note = Probe
  source 1..44: mol_type = other DNA
ccataacccagaggtcgatggatcgaaaccatcctctgctatcg

SEQ ID NO: 53236 - DNA, 44 bp, synthetic construct
  misc_feature 1..44: note = Probe
  source 1..44: mol_type = other DNA
ccataacccagaggtcgatggatcgaaaccatcctctgctattt

SEQ ID NO: 53237 - DNA, 42 bp, synthetic construct; identical to SEQ ID NO: 4578
  misc_feature 1..42: note = Probe
  source 1..42: mol_type = other DNA

SEQ ID NO: 53238 - DNA, 27 bp, synthetic construct
  misc_feature 1..27: note = Probe
  source 1..27: mol_type = other DNA
ccatagtgtagtggttatcacgtctgc

SEQ ID NO: 53239 - DNA, 28 bp, synthetic construct
  misc_feature 1..28: note = Probe
  source 1..28: mol_type = other DNA
ccatatggtctagcggttaggattcctg

SEQ ID NO: 53240 - DNA, 29 bp, synthetic construct
  misc_feature 1..29: note = Probe
  source 1..29: mol_type = other DNA
ccatatggtctagcggttaggattcctgg

SEQ ID NO: 53241 - DNA, 40 bp, synthetic construct; identical to SEQ ID NO: 4586
  misc_feature 1..40: note = Probe
  source 1..40: mol_type = other DNA

SEQ ID NO: 53242 - DNA, 41 bp, synthetic construct; identical to SEQ ID NO: 4587
  misc_feature 1..41: note = Probe
  source 1..41: mol_type = other DNA

SEQ ID NO: 53243 - DNA, 50 bp, synthetic construct; identical to SEQ ID NO: 29872
  misc_feature 1..50: note = Probe
  source 1..50: mol_type = other DNA

SEQ ID NO: 53244 - DNA, 28 bp, synthetic construct
  misc_feature 1..28: note = Probe
  source 1..28: mol_type = other DNA
cccaaaaattttggtgcaactccaaata

SEQ ID NO: 53245 - DNA, 37 bp, synthetic construct; identical to SEQ ID NO: 4594
  misc_feature 1..37: note = Probe
  source 1..37: mol_type = other DNA

SEQ ID NO: 53246 - DNA, 18 bp, synthetic construct
  misc_feature 1..18: note = Probe
  source 1..18: mol_type = other DNA
cccaaacccactccacct

SEQ ID NO: 53247 - DNA, 46 bp, synthetic construct; identical to SEQ ID NO: 4610
  misc_feature 1..46: note = Probe
  source 1..46: mol_type = other DNA

SEQ ID NO: 53248 - DNA, 49 bp, synthetic construct; identical to SEQ ID NO: 4612
  misc_feature 1..49: note = Probe
  source 1..49: mol_type = other DNA

SEQ ID NO: 53249 - DNA, 50 bp, synthetic construct; identical to SEQ ID NO: 4613
  misc_feature 1..50: note = Probe
  source 1..50: mol_type = other DNA

SEQ ID NO: 53250 - DNA, 17 bp, synthetic construct
  misc_feature 1..17: note = Probe
  source 1..17: mol_type = other DNA
cccaagaacagggtttg

SEQ ID NO: 53251 - DNA, 20 bp, synthetic construct
  misc_feature 1..20: note = Probe
  source 1..20: mol_type = other DNA
cccaagaacagggtttgtta

SEQ ID NO: 53252 - DNA, 26 bp, synthetic construct
  misc_feature 1..26: note = Probe
  source 1..26: mol_type = other DNA
cccacacccacccaagaacagggttt

SEQ ID NO: 53253 - DNA, 27 bp, synthetic construct
  misc_feature 1..27: note = Probe
  source 1..27: mol_type = other DNA
cccacacccacccaagaacagggtttg

SEQ ID NO: 53254 - DNA, 28 bp, synthetic construct
  misc_feature 1..28: note = Probe
  source 1..28: mol_type = other DNA
cccacacccacccaagaacagggtttgt

SEQ ID NO: 53255 - DNA, 29 bp, synthetic construct
  misc_feature 1..29: note = Probe
  source 1..29: mol_type = other DNA
cccacacccacccaagaacagggtttgtt

SEQ ID NO: 53256 - DNA, 30 bp, synthetic construct; identical to SEQ ID NO: 4619
  misc_feature 1..30: note = Probe
  source 1..30: mol_type = other DNA

SEQ ID NO: 53257 - DNA, 31 bp, synthetic construct; identical to SEQ ID NO: 4620
  misc_feature 1..31: note = Probe
  source 1..31: mol_type = other DNA

SEQ ID NO: 53258 - DNA, 33 bp, synthetic construct; identical to SEQ ID NO: 18359
  misc_feature 1..33: note = Probe
  source 1..33: mol_type = other DNA

SEQ ID NO: 53259 - DNA, 25 bp, synthetic construct
  misc_feature 1..25: note = Probe
  source 1..25: mol_type = other DNA
cccacatggtctagcggttaggatt

SEQ ID NO: 53260 - DNA, 27 bp, synthetic construct
  misc_feature 1..27: note = Probe
  source 1..27: mol_type = other DNA
cccacatggtctagcggttaggattcc

SEQ ID NO: 53261 - DNA, 29 bp, synthetic construct
  misc_feature 1..29: note = Probe
  source 1..29: mol_type = other DNA
cccacatggtctagcggttaggattcctg

SEQ ID NO: 53262 - DNA, 30 bp, synthetic construct; identical to SEQ ID NO: 9679
  misc_feature 1..30: note = Probe
  source 1..30: mol_type = other DNA

SEQ ID NO: 53263 - DNA, 38 bp, synthetic construct; identical to SEQ ID NO: 18368
  misc_feature 1..38: note = Probe
  source 1..38: mol_type = other DNA

SEQ ID NO: 53264 - DNA, 39 bp, synthetic construct
  misc_feature 1..39: note = Probe
  source 1..39: mol_type = other DNA
cccacatggtctagcggttaggattcctggttttcaccc

SEQ ID NO: 53265 - DNA, 20 bp, synthetic construct
  misc_feature 1..20: note = Probe
  source 1..20: mol_type = other DNA
cccacccaagaacagggttt

SEQ ID NO: 53266 - DNA, 21 bp, synthetic construct
  misc_feature 1..21: note = Probe
  source 1..21: mol_type = other DNA
cccacccaagaacagggtttg

SEQ ID NO: 53267 - DNA, 22 bp, synthetic construct
  misc_feature 1..22: note = Probe
  source 1..22: mol_type = other DNA
cccacccaagaacagggtttgt

SEQ ID NO: 53268 - DNA, 23 bp, synthetic construct
  misc_feature 1..23: note = Probe
  source 1..23: mol_type = other DNA
cccacccaagaacagggtttgtt

SEQ ID NO: 53269 - DNA, 24 bp, synthetic construct
  misc_feature 1..24: note = Probe
  source 1..24: mol_type = other DNA
cccacccaagaacagggtttgtta

SEQ ID NO: 53270 - DNA, 25 bp, synthetic construct
  misc_feature 1..25: note = Probe
  source 1..25: mol_type = other DNA
cccacccaagaacagggtttgttaa

SEQ ID NO: 53271 - DNA, 26 bp, synthetic construct
  misc_feature 1..26: note = Probe
  source 1..26: mol_type = other DNA
cccacccaagaacagggtttgttaag

SEQ ID NO: 53272 - DNA, 27 bp, synthetic construct
  misc_feature 1..27: note = Probe
  source 1..27: mol_type = other DNA
cccacccaagaacagggtttgttaaga

SEQ ID NO: 53273 - DNA, 45 bp, synthetic construct; identical to SEQ ID NO: 18409
  misc_feature 1..45: note = Probe
  source 1..45: mol_type = other DNA

SEQ ID NO: 53274 - DNA, 44 bp, synthetic construct; identical to SEQ ID NO: 46593
  misc_feature 1..44: note = Probe
  source 1..44: mol_type = other DNA

SEQ ID NO: 53275 - DNA, 43 bp, synthetic construct; identical to SEQ ID NO: 4644
  misc_feature 1..43: note = Probe
  source 1..43: mol_type = other DNA

SEQ ID NO: 53276 - DNA, 38 bp, synthetic construct; identical to SEQ ID NO: 18418
  misc_feature 1..38: note = Probe
  source 1..38: mol_type = other DNA

SEQ ID NO: 53277 - DNA, 30 bp, synthetic construct; identical to SEQ ID NO: 4650
  misc_feature 1..30: note = Probe
  source 1..30: mol_type = other DNA

SEQ ID NO: 53278 - DNA, 21 bp, synthetic construct
  misc_feature 1..21: note = Probe
  source 1..21: mol_type = other DNA
cccattcttgcgacccgggtt

SEQ ID NO: 53279 - DNA, 22 bp, synthetic construct
  misc_feature 1..22: note = Probe
  source 1..22: mol_type = other DNA
cccattcttgcgacccgggttc

SEQ ID NO: 53280 - DNA, 23 bp, synthetic construct
  misc_feature 1..23: note = Probe
  source 1..23: mol_type = other DNA
cccattcttgcgacccgggttcg

SEQ ID NO: 53281 - DNA, 24 bp, synthetic construct
  misc_feature 1..24: note = Probe
  source 1..24: mol_type = other DNA
cccattcttgcgacccgggttcga

SEQ ID NO: 53282 - DNA, 25 bp, synthetic construct
  misc_feature 1..25: note = Probe
  source 1..25: mol_type = other DNA
cccattcttgcgacccgggttcgat

SEQ ID NO: 53283 - DNA, 26 bp, synthetic construct
  misc_feature 1..26: note = Probe
  source 1..26: mol_type = other DNA
cccattcttgcgacccgggttcgatt

SEQ ID NO: 53284 - DNA, 27 bp, synthetic construct
  misc_feature 1..27: note = Probe
  source 1..27: mol_type = other DNA
cccattcttgcgacccgggttcgattc

SEQ ID NO: 53285 - DNA, 28 bp, synthetic construct
  misc_feature 1..28: note = Probe
  source 1..28: mol_type = other DNA
cccattcttgcgacccgggttcgattcc

SEQ ID NO: 53286 - DNA, 36 bp, synthetic construct; identical to SEQ ID NO: 4652
  misc_feature 1..36: note = Probe
  source 1..36: mol_type = other DNA

SEQ ID NO: 53287 - DNA, 38 bp, synthetic construct; identical to SEQ ID NO: 4653
  misc_feature 1..38: note = Probe
  source 1..38: mol_type = other DNA

SEQ ID NO: 53288 - DNA, 41 bp, synthetic construct; identical to SEQ ID NO: 4655
  misc_feature 1..41: note = Probe
  source 1..41: mol_type = other DNA

SEQ ID NO: 53289 - DNA, 42 bp, synthetic construct; identical to SEQ ID NO: 4656
  misc_feature 1..42: note = Probe
  source 1..42: mol_type = other DNA

SEQ ID NO: 53290 - DNA, 43 bp, synthetic construct; identical to SEQ ID NO: 4657
  misc_feature 1..43: note = Probe
  source 1..43: mol_type = other DNA

SEQ ID NO: 53291 - DNA, 44 bp, synthetic construct; identical to SEQ ID NO: 4658
  misc_feature 1..44: note = Probe
  source 1..44: mol_type = other DNA

SEQ ID NO: 53292 - DNA, 45 bp, synthetic construct; identical to SEQ ID NO: 4659
  misc_feature 1..45: note = Probe
  source 1..45: mol_type = other DNA

SEQ ID NO: 53293 - DNA, 46 bp, synthetic construct
  misc_feature 1..46: note = Probe
  source 1..46: mol_type = other DNA
cccattcttgcgacccgggttcgattcccgggcggcgcacttagtt

SEQ ID NO: 53294 - DNA, 49 bp, synthetic construct; identical to SEQ ID NO: 4660
  misc_feature 1..49: note = Probe
  source 1..49: mol_type = other DNA

SEQ ID NO: 53295 - DNA, 50 bp, synthetic construct; identical to SEQ ID NO: 4661
  misc_feature 1..50: note = Probe
  source 1..50: mol_type = other DNA

SEQ ID NO: 53296 - DNA, 40 bp, synthetic construct; identical to SEQ ID NO: 4662
  misc_feature 1..40: note = Probe
  source 1..40: mol_type = other DNA

SEQ ID NO: 53297 - DNA, 42 bp, synthetic construct; identical to SEQ ID NO: 46626
  misc_feature 1..42: note = Probe
  source 1..42: mol_type = other DNA

SEQ ID NO: 53298 - DNA, 43 bp, synthetic construct; identical to SEQ ID NO: 4663
  misc_feature 1..43: note = Probe
  source 1..43: mol_type = other DNA

SEQ ID NO: 53299 - DNA, 44 bp, synthetic construct; identical to SEQ ID NO: 4664
  misc_feature 1..44: note = Probe
  source 1..44: mol_type = other DNA

SEQ ID NO: 53300 - DNA, 45 bp, synthetic construct; identical to SEQ ID NO: 4665
  misc_feature 1..45: note = Probe
  source 1..45: mol_type = other DNA

SEQ ID NO: 53301 - DNA, 49 bp, synthetic construct
  misc_feature 1..49: note = Probe
  source 1..49: mol_type = other DNA
cccattcttgcgacccgggttcgattcccgggcggcgcataggcgtttt

SEQ ID NO: 53302 - DNA, 50 bp, synthetic construct; identical to SEQ ID NO: 4666
  misc_feature 1..50: note = Probe
  source 1..50: mol_type = other DNA

SEQ ID NO: 53303 - DNA, 29 bp, synthetic construct
  misc_feature 1..29: note = Probe
  source 1..29: mol_type = other DNA
ccccaaaaattttggtgcaactccaaata

SEQ ID NO: 53304 - DNA, 38 bp, synthetic construct; identical to SEQ ID NO: 4673
  misc_feature 1..38: note = Probe
  source 1..38: mol_type = other DNA

SEQ ID NO: 53305 - DNA, 19 bp, synthetic construct
  misc_feature 1..19: note = Probe
  source 1..19: mol_type = other DNA
ccccaaacccactccacct

SEQ ID NO: 53306 - DNA, 22 bp, synthetic construct
  misc_feature 1..22: note = Probe
  source 1..22: mol_type = other DNA
ccccatgtctaacaacatggct

SEQ ID NO: 53307 - DNA, 23 bp, synthetic construct
  misc_feature 1..23: note = Probe
  source 1..23: mol_type = other DNA
cccccatgtctaacaacatggct

SEQ ID NO: 53308 - DNA, 24 bp, synthetic construct
  misc_feature 1..24: note = Probe
  source 1..24: mol_type = other DNA
cccccatgtctaacaacatggctt

SEQ ID NO: 53309 - DNA, 25 bp, synthetic construct
  misc_feature 1..25: note = Probe
  source 1..25: mol_type = other DNA
cccccatgtctaacaacatggcttt

SEQ ID NO: 53310 - DNA, 26 bp, synthetic construct
  misc_feature 1..26: note = Probe
  source 1..26: mol_type = other DNA
cccccatgtctaacaacatggctttc

SEQ ID NO: 53311 - DNA, 27 bp, synthetic construct
  misc_feature 1..27: note = Probe
  source 1..27: mol_type = other DNA
cccccatgtctaacaacatggctttct

SEQ ID NO: 53312 - DNA, 32 bp, synthetic construct; identical to SEQ ID NO: 4696
  misc_feature 1..32: note = Probe
  source 1..32: mol_type = other DNA

SEQ ID NO: 53313 - DNA, 31 bp, synthetic construct; identical to SEQ ID NO: 602
  misc_feature 1..31: note = Probe
  source 1..31: mol_type = other DNA

SEQ ID NO: 53314 - DNA, 37 bp, synthetic construct; identical to SEQ ID NO: 4703
  misc_feature 1..37: note = Probe
  source 1..37: mol_type = other DNA

SEQ ID NO: 53315 - DNA, 28 bp, synthetic construct
  misc_feature 1..28: note = Probe
  source 1..28: mol_type = other DNA
cccgaaaatgttggttatacccttcccg

SEQ ID NO: 53316 - DNA, 30 bp, synthetic construct; identical to SEQ ID NO: 611
  misc_feature 1..30: note = Probe
  source 1..30: mol_type = other DNA

SEQ ID NO: 53317 - DNA, 36 bp, synthetic construct; identical to SEQ ID NO: 18528
  misc_feature 1..36: note = Probe
  source 1..36: mol_type = other DNA

SEQ ID NO: 53318 - DNA, 16 bp, synthetic construct
  misc_feature 1..16: note = Probe
  source 1..16: mol_type = other DNA
cccggcacctccacca

SEQ ID NO: 53319 - DNA, 30 bp, synthetic construct; identical to SEQ ID NO: 4748
  misc_feature 1..30: note = Probe
  source 1..30: mol_type = other DNA

SEQ ID NO: 53320 - DNA, 31 bp, synthetic construct; identical to SEQ ID NO: 621
  misc_feature 1..31: note = Probe
  source 1..31: mol_type = other DNA

SEQ ID NO: 53321 - DNA, 29 bp, synthetic construct
  misc_feature 1..29: note = Probe
  source 1..29: mol_type = other DNA
cccggctagctcagtcggtagagcatggg

SEQ ID NO: 53322 - DNA, 31 bp, synthetic construct; identical to SEQ ID NO: 626
  misc_feature 1..31: note = Probe
  source 1..31: mol_type = other DNA

SEQ ID NO: 53323 - DNA, 33 bp, synthetic construct; identical to SEQ ID NO: 628
  misc_feature 1..33: note = Probe
  source 1..33: mol_type = other DNA

SEQ ID NO: 53324 - DNA, 41 bp, synthetic construct
  misc_feature 1..41: note = Probe
  source 1..41: mol_type = other DNA
cccggctagctcagtcggtagagcatgggactcttaatccc

SEQ ID NO: 53325 - DNA, 28 bp, synthetic construct
  misc_feature 1..28: note = Probe
  source 1..28: mol_type = other DNA
cccggtaatcgcataaaacttaaaactt

SEQ ID NO: 53326 - DNA, 50 bp, synthetic construct; identical to SEQ ID NO: 632
  misc_feature 1..50: note = Probe
  source 1..50: mol_type = other DNA

SEQ ID NO: 53327 - DNA, 16 bp, synthetic construct
  misc_feature 1..16: note = Probe
  source 1..16: mol_type = other DNA
cccggtcagggaacca

SEQ ID NO: 53328 - DNA, 30 bp, synthetic construct; identical to SEQ ID NO: 637
  misc_feature 1..30: note = Probe
  source 1..30: mol_type = other DNA

SEQ ID NO: 53329 - DNA, 31 bp, synthetic construct; identical to SEQ ID NO: 638
  misc_feature 1..31: note = Probe
  source 1..31: mol_type = other DNA

SEQ ID NO: 53330 - DNA, 34 bp, synthetic construct; identical to SEQ ID NO: 641
  misc_feature 1..34: note = Probe
  source 1..34: mol_type = other DNA

SEQ ID NO: 53331 - DNA, 41 bp, synthetic construct
  misc_feature 1..41: note = Probe
  source 1..41: mol_type = other DNA
ccctggtggtctagtggttaggattcggcgctctcaccgcc

SEQ ID NO: 53332 - DNA, 50 bp, synthetic construct; identical to SEQ ID NO: 4772
  misc_feature 1..50: note = Probe
  source 1..50: mol_type = other DNA

SEQ ID NO: 53333 - DNA, 29 bp, synthetic construct
  misc_feature 1..29: note = Probe
  source 1..29: mol_type = other DNA
ccgaaaatgttggttatacccttcccgta

SEQ ID NO: 53334 - DNA, 35 bp, synthetic construct; identical to SEQ ID NO: 18603
  misc_feature 1..35: note = Probe
  source 1..35: mol_type = other DNA

SEQ ID NO: 53335 - DNA, 16 bp, synthetic construct
  misc_feature 1..16: note = Probe
  source 1..16: mol_type = other DNA
ccgcagcaacctcggt

SEQ ID NO: 53336 - DNA, 17 bp, synthetic construct
  misc_feature 1..17: note = Probe
  source 1..17: mol_type = other DNA
ccgcagcaacctcggtt

SEQ ID NO: 53337 - DNA, 19 bp, synthetic construct
  misc_feature 1..19: note = Probe
  source 1..19: mol_type = other DNA
ccgctggtgtagtggtatc

SEQ ID NO: 53338 - DNA, 25 bp, synthetic construct
  misc_feature 1..25: note = Probe
  source 1..25: mol_type = other DNA
ccgctggtgtagtggtatcatgcaa

SEQ ID NO: 53339 - DNA, 26 bp, synthetic construct
  misc_feature 1..26: note = Probe
  source 1..26: mol_type = other DNA
ccgctggtgtagtggtatcatgcaag

SEQ ID NO: 53340 - DNA, 30 bp, synthetic construct; identical to SEQ ID NO: 657
  misc_feature 1..30: note = Probe
  source 1..30: mol_type = other DNA

SEQ ID NO: 53341 - DNA, 31 bp, synthetic construct; identical to SEQ ID NO: 658
  misc_feature 1..31: note = Probe
  source 1..31: mol_type = other DNA

SEQ ID NO: 53342 - DNA, 32 bp, synthetic construct; identical to SEQ ID NO: 659
  misc_feature 1..32: note = Probe
  source 1..32: mol_type = other DNA

SEQ ID NO: 53343 - DNA, 35 bp, synthetic construct; identical to SEQ ID NO: 18676
  misc_feature 1..35: note = Probe
  source 1..35: mol_type = other DNA

SEQ ID NO: 53344 - DNA, 37 bp, synthetic construct; identical to SEQ ID NO: 18677
  misc_feature 1..37: note = Probe
  source 1..37: mol_type = other DNA

SEQ ID NO: 53345 - DNA, 38 bp, synthetic construct; identical to SEQ ID NO: 18678
  misc_feature 1..38: note = Probe
  source 1..38: mol_type = other DNA

SEQ ID NO: 53346 - DNA, 45 bp, synthetic construct
  misc_feature 1..45: note = Probe
  source 1..45: mol_type = other DNA
ccgctggtgtagtggtatcatgcaagattcccattcttgcgaccc

SEQ ID NO: 53347 - DNA, 50 bp, synthetic construct; identical to SEQ ID NO: 18682
  misc_feature 1..50: note = Probe
  source 1..50: mol_type = other DNA

SEQ ID NO: 53348 - DNA, 29 bp, synthetic construct
  misc_feature 1..29: note = Probe
  source 1..29: mol_type = other DNA
ccggagatgaaaacctttttccaaggaca

SEQ ID NO: 53349 - DNA, 31 bp, synthetic construct; identical to SEQ ID NO: 4817
  misc_feature 1..31: note = Probe
  source 1..31: mol_type = other DNA

SEQ ID NO: 53350 - DNA, 32 bp, synthetic construct; identical to SEQ ID NO: 4818
  misc_feature 1..32: note = Probe
  source 1..32: mol_type = other DNA

SEQ ID NO: 53351 - DNA, 33 bp, synthetic construct; identical to SEQ ID NO: 4819
  misc_feature 1..33: note = Probe
  source 1..33: mol_type = other DNA

SEQ ID NO: 53352 - DNA, 24 bp, synthetic construct
  misc_feature 1..24: note = Probe
  source 1..24: mol_type = other DNA
ccggatagctcagtcggtagagca

SEQ ID NO: 53353 - DNA, 26 bp, synthetic construct
  misc_feature 1..26: note = Probe
  source 1..26: mol_type = other DNA
ccggatagctcagtcggtagagcatc

SEQ ID NO: 53354 - DNA, 32 bp, synthetic construct; identical to SEQ ID NO: 670
  misc_feature 1..32: note = Probe
  source 1..32: mol_type = other DNA

SEQ ID NO: 53355 - DNA, 21 bp, synthetic construct
  misc_feature 1..21: note = Probe
  source 1..21: mol_type = other DNA
ccggctagctcagtcggtaga

SEQ ID NO: 53356 - DNA, 23 bp, synthetic construct
  misc_feature 1..23: note = Probe
  source 1..23: mol_type = other DNA
ccggctagctcagtcggtagagc

SEQ ID NO: 53357 - DNA, 25 bp, synthetic construct
  misc_feature 1..25: note = Probe
  source 1..25: mol_type = other DNA
ccggctagctcagtcggtagagcat

SEQ ID NO: 53358 - DNA, 26 bp, synthetic construct
  misc_feature 1..26: note = Probe
  source 1..26: mol_type = other DNA
ccggctagctcagtcggtagagcatg

SEQ ID NO: 53359 - DNA, 27 bp, synthetic construct
  misc_feature 1..27: note = Probe
  source 1..27: mol_type = other DNA
ccggctagctcagtcggtagagcatga

SEQ ID NO: 53360 - DNA, 28 bp, synthetic construct
  misc_feature 1..28: note = Probe
  source 1..28: mol_type = other DNA
ccggctagctcagtcggtagagcatgag

SEQ ID NO: 53361 - DNA, 31 bp, synthetic construct; identical to SEQ ID NO: 676
  misc_feature 1..31: note = Probe
  source 1..31: mol_type = other DNA

SEQ ID NO: 53362 - DNA, 32 bp, synthetic construct; identical to SEQ ID NO: 677
  misc_feature 1..32: note = Probe
  source 1..32: mol_type = other DNA

SEQ ID NO: 53363 - DNA, 27 bp, synthetic construct
  misc_feature 1..27: note = Probe
  source 1..27: mol_type = other DNA
ccggctagctcagtcggtagagcatgg

SEQ ID NO: 53364 - DNA, 28 bp, synthetic construct
  misc_feature 1..28: note = Probe
  source 1..28: mol_type = other DNA
ccggctagctcagtcggtagagcatggg

SEQ ID NO: 53365 - DNA, 40 bp, synthetic construct; identical to SEQ ID NO: 30125
  misc_feature 1..40: note = Probe
  source 1..40: mol_type = other DNA

SEQ ID NO: 53366 - DNA, 50 bp, synthetic construct; identical to SEQ ID NO: 4828
  misc_feature 1..50: note = Probe
  source 1..50: mol_type = other DNA

SEQ ID NO: 53367 - DNA, 18 bp, synthetic construct
  misc_feature 1..18: note = Probe
  source 1..18: mol_type = other DNA
ccgggttcgattcccggg

SEQ ID NO: 53368 - DNA, 50 bp, synthetic construct; identical to SEQ ID NO: 685
  misc_feature 1..50: note = Probe
  source 1..50: mol_type = other DNA

SEQ ID NO: 53369 - DNA, 28 bp, synthetic construct
  misc_feature 1..28: note = Probe
  source 1..28: mol_type = other DNA
ccgtagtgtagcggttatcacattcgcc

SEQ ID NO: 53370 - DNA, 24 bp, synthetic construct
  misc_feature 1..24: note = Probe
  source 1..24: mol_type = other DNA
ccgtagtgtagtggtcatcacgtt

SEQ ID NO: 53371 - DNA, 27 bp, synthetic construct
  misc_feature 1..27: note = Probe
  source 1..27: mol_type = other DNA
ccgtagtgtagtggtcatcacgttcgc

SEQ ID NO: 53372 - DNA, 23 bp, synthetic construct
  misc_feature 1..23: note = Probe
  source 1..23: mol_type = other DNA
ccgtagtgtagtggttatcacgt

SEQ ID NO: 53373 - DNA, 24 bp, synthetic construct
  misc_feature 1..24: note = Probe
  source 1..24: mol_type = other DNA
ccgtagtgtagtggttatcacgtt

SEQ ID NO: 53374 - DNA, 26 bp, synthetic construct
  misc_feature 1..26: note = Probe
  source 1..26: mol_type = other DNA
ccgtagtgtagtggttatcacgttcg

SEQ ID NO: 53375 - DNA, 27 bp, synthetic construct
  misc_feature 1..27: note = Probe
  source 1..27: mol_type = other DNA
ccgtagtgtagtggttatcacgttcgc

SEQ ID NO: 53376 - DNA, 28 bp, synthetic construct
  misc_feature 1..28: note = Probe
  source 1..28: mol_type = other DNA
ccgtagtgtagtggttatcacgttcgcc

SEQ ID NO: 53377 - DNA, 36 bp, synthetic construct; identical to SEQ ID NO: 18744
  misc_feature 1..36: note = Probe
  source 1..36: mol_type = other DNA

SEQ ID NO: 53378 - DNA, 50 bp, synthetic construct; identical to SEQ ID NO: 4842
  misc_feature 1..50: note = Probe
  source 1..50: mol_type = other DNA

SEQ ID NO: 53379 - DNA, 31 bp, synthetic construct; identical to SEQ ID NO: 4844
  misc_feature 1..31: note = Probe
  source 1..31: mol_type = other DNA

SEQ ID NO: 53380 - DNA, 35 bp, synthetic construct
  misc_feature 1..35: note = Probe
  source 1..35: mol_type = other DNA
ccgtagtgtagtggttatcacgttcgcctcacacg

SEQ ID NO: 53381 - DNA, 36 bp, synthetic construct; identical to SEQ ID NO: 18750
  misc_feature 1..36: note = Probe
  source 1..36: mol_type = other DNA

SEQ ID NO: 53382 - DNA, 50 bp, synthetic construct; identical to SEQ ID NO: 4847
  misc_feature 1..50: note = Probe
  source 1..50: mol_type = other DNA

SEQ ID NO: 53383 - DNA, 25 bp, synthetic construct
  misc_feature 1..25: note = Probe
  source 1..25: mol_type = other DNA
ccgtgatcgtatagtggttagtact

SEQ ID NO: 53384 - DNA, 28 bp, synthetic construct
  misc_feature 1..28: note = Probe
  source 1..28: mol_type = other DNA
ccgtggtgtagtggttatcacattcgcc

SEQ ID NO: 53385 - DNA, 49 bp, synthetic construct; identical to SEQ ID NO: 46905
  misc_feature 1..49: note = Probe
  source 1..49: mol_type = other DNA

SEQ ID NO: 53386 - DNA, 50 bp, synthetic construct; identical to SEQ ID NO: 4855
  misc_feature 1..50: note = Probe
  source 1..50: mol_type = other DNA

SEQ ID NO: 53387 - DNA, 24 bp, synthetic construct
  misc_feature 1..24: note = Probe
  source 1..24: mol_type = other DNA
cctaacacgcgaaaggtccccggt

SEQ ID NO: 53388 - DNA, 21 bp, synthetic construct
  misc_feature 1..21: note = Probe
  source 1..21: mol_type = other DNA
cctaagccagggattgtgggt

SEQ ID NO: 53389 - DNA, 24 bp, synthetic construct
  misc_feature 1..24: note = Probe
  source 1..24: mol_type = other DNA
cctagccccaaacccactccacct

SEQ ID NO: 53390 - DNA, 18 bp, synthetic construct
  misc_feature 1..18: note = Probe
  source 1..18: mol_type = other DNA
cctagcctttctattagc

SEQ ID NO: 53391 - DNA, 24 bp, synthetic construct
  misc_feature 1..24: note = Probe
  source 1..24: mol_type = other DNA
cctcacacgcgaaaggtccccggt

SEQ ID NO: 53392 - DNA, 24 bp, synthetic construct
  misc_feature 1..24: note = Probe
  source 1..24: mol_type = other DNA
cctcctaagccagggattgtgggt

SEQ ID NO: 53393 - DNA, 29 bp, synthetic construct
  misc_feature 1..29: note = Probe
  source 1..29: mol_type = other DNA
cctcgttagtatagtggtgagtatccccg

SEQ ID NO: 53394 - DNA, 25 bp, synthetic construct
  misc_feature 1..25: note = Probe
  source 1..25: mol_type = other DNA
cctgccacgcgggaggcccgggttc

SEQ ID NO: 53395 - DNA, 50 bp, synthetic construct; identical to SEQ ID NO: 39222
  misc_feature 1..50: note = Probe
  source 1..50: mol_type = other DNA

SEQ ID NO: 53396 - DNA, 26 bp, synthetic construct
  misc_feature 1..26: note = Probe
  source 1..26: mol_type = other DNA
cctgccacgcgggaggcccgggtttg

SEQ ID NO: 53397 - DNA, 16 bp, synthetic construct
  misc_feature 1..16: note = Probe
  source 1..16: mol_type = other DNA
cctgtcacgcgggaga

SEQ ID NO: 53398 - DNA, 17 bp, synthetic construct
  misc_feature 1..17: note = Probe
  source 1..17: mol_type = other DNA
cctgtcacgcgggagac

SEQ ID NO: 53399 - DNA, 18 bp, synthetic construct
  misc_feature 1..18: note = Probe
  source 1..18: mol_type = other DNA
cctgtcacgcgggagacc

SEQ ID NO: 53400 - DNA, 21 bp, synthetic construct
  misc_feature 1..21: note = Probe
  source 1..21: mol_type = other DNA
cctgtcacgcgggagaccggg

SEQ ID NO: 53401 - DNA, 25 bp, synthetic construct
  misc_feature 1..25: note = Probe
  source 1..25: mol_type = other DNA
cctgtcacgcgggagaccggggttc

SEQ ID NO: 53402 - DNA, 26 bp, synthetic construct
  misc_feature 1..26: note = Probe
  source 1..26: mol_type = other DNA
cctgtcacgcgggagaccggggttca

SEQ ID NO: 53403 - DNA, 27 bp, synthetic construct
  misc_feature 1..27: note = Probe
  source 1..27: mol_type = other DNA
cctgtcacgcgggagaccggggttcaa

SEQ ID NO: 53404 - DNA, 26 bp, synthetic construct
  misc_feature 1..26: note = Probe
  source 1..26: mol_type = other DNA
cctgtcacgcgggagaccggggttcg

SEQ ID NO: 53405 - DNA, 45 bp, synthetic construct; identical to SEQ ID NO: 4886
  misc_feature 1..45: note = Probe
  source 1..45: mol_type = other DNA

SEQ ID NO: 53406 - DNA, 16 bp, synthetic construct
  misc_feature 1..16: note = Probe
  source 1..16: mol_type = other DNA
ccttccaagcagttga

SEQ ID NO: 53407 - DNA, 17 bp, synthetic construct
  misc_feature 1..17: note = Probe
  source 1..17: mol_type = other DNA
ccttccaagcagttgac

SEQ ID NO: 53408 - DNA, 18 bp, synthetic construct
  misc_feature 1..18: note = Probe
  source 1..18: mol_type = other DNA
ccttccaagcagttgacc

SEQ ID NO: 53409 - DNA, 20 bp, synthetic construct
  misc_feature 1..20: note = Probe
  source 1..20: mol_type = other DNA
ccttccaagcagttgacccg

SEQ ID NO: 53410 - DNA, 21 bp, synthetic construct
  misc_feature 1..21: note = Probe
  source 1..21: mol_type = other DNA
ccttccaagcagttgacccgg

SEQ ID NO: 53411 - DNA, 22 bp, synthetic construct
  misc_feature 1..22: note = Probe
  source 1..22: mol_type = other DNA
ccttccaagcagttgacccggg

SEQ ID NO: 53412 - DNA, 23 bp, synthetic construct
  misc_feature 1..23: note = Probe
  source 1..23: mol_type = other DNA
ccttccaagcagttgacccgggt

SEQ ID NO: 53413 - DNA, 25 bp, synthetic construct
  misc_feature 1..25: note = Probe
  source 1..25: mol_type = other DNA
ccttccaagcagttgacccgggttc

SEQ ID NO: 53414 - DNA, 26 bp, synthetic construct
  misc_feature 1..26: note = Probe
  source 1..26: mol_type = other DNA
ccttccaagcagttgacccgggttcg

SEQ ID NO: 53415 - DNA, 27 bp, synthetic construct
  misc_feature 1..27: note = Probe
  source 1..27: mol_type = other DNA
ccttccaagcagttgacccgggttcga

SEQ ID NO: 53416 - DNA, 28 bp, synthetic construct
  misc_feature 1..28: note = Probe
  source 1..28: mol_type = other DNA
ccttccaagcagttgacccgggttcgat

SEQ ID NO: 53417 - DNA, 16 bp, synthetic construct
  misc_feature 1..16: note = Probe
  source 1..16: mol_type = other DNA
ccttcgatagctcagc

SEQ ID NO: 53418 - DNA, 19 bp, synthetic construct
  misc_feature 1..19: note = Probe
  source 1..19: mol_type = other DNA
ccttcgatagctcagttgg

SEQ ID NO: 53419 - DNA, 50 bp, synthetic construct; identical to SEQ ID NO: 4905
  misc_feature 1..50: note = Probe
  source 1..50: mol_type = other DNA

SEQ ID NO: 53420 - DNA, 28 bp, synthetic construct
  misc_feature 1..28: note = Probe
  source 1..28: mol_type = other DNA
cgaaaatgttggttatacccttcccgta

SEQ ID NO: 53421 - DNA, 30 bp, synthetic construct; identical to SEQ ID NO: 709
  misc_feature 1..30: note = Probe
  source 1..30: mol_type = other DNA

SEQ ID NO: 53422 - DNA, 31 bp, synthetic construct; identical to SEQ ID NO: 710
  misc_feature 1..31: note = Probe
  source 1..31: mol_type = other DNA

SEQ ID NO: 53423 - DNA, 33 bp, synthetic construct; identical to SEQ ID NO: 4916
  misc_feature 1..33: note = Probe
  source 1..33: mol_type = other DNA

SEQ ID NO: 53424 - DNA, 34 bp, synthetic construct; identical to SEQ ID NO: 4917
  misc_feature 1..34: note = Probe
  source 1..34: mol_type = other DNA

SEQ ID NO: 53425 - DNA, 21 bp, synthetic construct
  misc_feature 1..21: note = Probe
  source 1..21: mol_type = other DNA
cgaaaccatcctctgctaggt

SEQ ID NO: 53426 - DNA, 21 bp, synthetic construct
  misc_feature 1..21: note = Probe
  source 1..21: mol_type = other DNA
cgaaaccgggcggaaacacct

SEQ ID NO: 53427 - DNA, 28 bp, synthetic construct
  misc_feature 1..28: note = Probe
  source 1..28: mol_type = other DNA
cgaagaagcagcttcaaacctgccgggg

SEQ ID NO: 53428 - DNA, 30 bp, synthetic construct; identical to SEQ ID NO: 4930
  misc_feature 1..30: note = Probe
  source 1..30: mol_type = other DNA

SEQ ID NO: 53429 - DNA, 33 bp, synthetic construct; identical to SEQ ID NO: 4933
  misc_feature 1..33: note = Probe
  source 1..33: mol_type = other DNA

SEQ ID NO: 53430 - DNA, 34 bp, synthetic construct; identical to SEQ ID NO: 4934
  misc_feature 1..34: note = Probe
  source 1..34: mol_type = other DNA

SEQ ID NO: 53431 - DNA, 36 bp, synthetic construct; identical to SEQ ID NO: 4936
  misc_feature 1..36: note = Probe
  source 1..36: mol_type = other DNA

SEQ ID NO: 53432 - DNA, 38 bp, synthetic construct; identical to SEQ ID NO: 18899
  misc_feature 1..38: note = Probe
  source 1..38: mol_type = other DNA

SEQ ID NO: 53433 - DNA, 39 bp, synthetic construct
  misc_feature 1..39: note = Probe
  source 1..39: mol_type = other DNA
cgaagaagcagcttcaaacctgccggggcttctcccgcc

SEQ ID NO: 53434 - DNA, 21 bp, synthetic construct
  misc_feature 1..21: note = Probe
  source 1..21: mol_type = other DNA
cgaatcccaccgctgccacac

SEQ ID NO: 53435 - DNA, 21 bp, synthetic construct
  misc_feature 1..21: note = Probe
  source 1..21: mol_type = other DNA
cgaatcccaccgctgccaggt

SEQ ID NO: 53436 - DNA, 21 bp, synthetic construct
  misc_feature 1..21: note = Probe
  source 1..21: mol_type = other DNA
cgaatcccagcggtgcctccg

SEQ ID NO: 53437 - DNA, 50 bp, synthetic construct; identical to SEQ ID NO: 47051
  misc_feature 1..50: note = Probe
  source 1..50: mol_type = other DNA

SEQ ID NO: 53438 - DNA, 37 bp, synthetic construct; identical to SEQ ID NO: 4944
  misc_feature 1..37: note = Probe
  source 1..37: mol_type = other DNA

SEQ ID NO: 53439 - DNA, 21 bp, synthetic construct
  misc_feature 1..21: note = Probe
  source 1..21: mol_type = other DNA
cgactcccggtatgggaacaa

SEQ ID NO: 53440 - DNA, 21 bp, synthetic construct
  misc_feature 1..21: note = Probe
  source 1..21: mol_type = other DNA
cgactcccggtgtgggaacgc

SEQ ID NO: 53441 - DNA, 21 bp, synthetic construct
  misc_feature 1..21: note = Probe
  source 1..21: mol_type = other DNA
cgatccccggcatctccattg

SEQ ID NO: 53442 - DNA, 21 bp, synthetic construct
  misc_feature 1..21: note = Probe
  source 1..21: mol_type = other DNA
cgattccccgacggggaggca

SEQ ID NO: 53443 - DNA, 21 bp, synthetic construct
  misc_feature 1..21: note = Probe
  source 1..21: mol_type = other DNA
cgattcccggccaacgcaagt

SEQ ID NO: 53444 - DNA, 21 bp, synthetic construct
  misc_feature 1..21: note = Probe
  source 1..21: mol_type = other DNA
cgattcccggccaacgcagtg

SEQ ID NO: 53445 - DNA, 21 bp, synthetic construct
  misc_feature 1..21: note = Probe
  source 1..21: mol_type = other DNA
cgattcccggccaatgcacga

SEQ ID NO: 53446 - DNA, 21 bp, synthetic construct
  misc_feature 1..21: note = Probe
  source 1..21: mol_type = other DNA
cgattcccggccaatgcagca

SEQ ID NO: 53447 - DNA, 21 bp, synthetic construct
  misc_feature 1..21: note = Probe
  source 1..21: mol_type = other DNA
cgattcccggcccatgcagca

SEQ ID NO: 53448 - DNA, 21 bp, synthetic construct
  misc_feature 1..21: note = Probe
  source 1..21: mol_type = other DNA
cgattcccgggcggcgcactt

SEQ ID NO: 53449 - DNA, 21 bp, synthetic construct
  misc_feature 1..21: note = Probe
  source 1..21: mol_type = other DNA
cgattctcatagtcctagaaa

SEQ ID NO: 53450 - DNA, 39 bp, synthetic construct; identical to SEQ ID NO: 4967
  misc_feature 1..39: note = Probe
  source 1..39: mol_type = other DNA

SEQ ID NO: 53451 - DNA, 27 bp, synthetic construct
  misc_feature 1..27: note = Probe
  source 1..27: mol_type = other DNA
cgcataaaacttaaaactttacagtca

SEQ ID NO: 53452 - DNA, 34 bp, synthetic construct; identical to SEQ ID NO: 4978
  misc_feature 1..34: note = Probe
  source 1..34: mol_type = other DNA

SEQ ID NO: 53453 - DNA, 44 bp, synthetic construct; identical to SEQ ID NO: 717
  misc_feature 1..44: note = Probe
  source 1..44: mol_type = other DNA

SEQ ID NO: 53454 - DNA, 45 bp, synthetic construct; identical to SEQ ID NO: 718
  misc_feature 1..45: note = Probe
  source 1..45: mol_type = other DNA

SEQ ID NO: 53455 - DNA, 46 bp, synthetic construct; identical to SEQ ID NO: 4979
  misc_feature 1..46: note = Probe
  source 1..46: mol_type = other DNA

SEQ ID NO: 53456 - DNA, 49 bp, synthetic construct; identical to SEQ ID NO: 4980
  misc_feature 1..49: note = Probe
  source 1..49: mol_type = other DNA

SEQ ID NO: 53457 - DNA, 50 bp, synthetic construct; identical to SEQ ID NO: 4981
  misc_feature 1..50: note = Probe
  source 1..50: mol_type = other DNA

SEQ ID NO: 53458 - DNA, 16 bp, synthetic construct
  misc_feature 1..16: note = Probe
  source 1..16: mol_type = other DNA
cgccaaggtcgcgggt

SEQ ID NO: 53459 - DNA, 19 bp, synthetic construct
  misc_feature 1..19: note = Probe
  source 1..19: mol_type = other DNA
cgcccggatagctcagtcg

SEQ ID NO: 53460 - DNA, 29 bp, synthetic construct
  misc_feature 1..29: note = Probe
  source 1..29: mol_type = other DNA
cgccgctggtgtagtggtatcatgcaaga

SEQ ID NO: 53461 - DNA, 24 bp, synthetic construct
  misc_feature 1..24: note = Probe
  source 1..24: mol_type = other DNA
cgccgtgatcgtatagtggttagt

SEQ ID NO: 53462 - DNA, 32 bp, synthetic construct; identical to SEQ ID NO: 4998
  misc_feature 1..32: note = Probe
  source 1..32: mol_type = other DNA

SEQ ID NO: 53463 - DNA, 34 bp, synthetic construct; identical to SEQ ID NO: 5000
  misc_feature 1..34: note = Probe
  source 1..34: mol_type = other DNA

SEQ ID NO: 53464 - DNA, 36 bp, synthetic construct; identical to SEQ ID NO: 5002
  misc_feature 1..36: note = Probe
  source 1..36: mol_type = other DNA

SEQ ID NO: 53465 - DNA, 26 bp, synthetic construct
  misc_feature 1..26: note = Probe
  source 1..26: mol_type = other DNA
cgcctcacacgcgaaaggtccccggt

SEQ ID NO: 53466 - DNA, 50 bp, synthetic construct; identical to SEQ ID NO: 5007
  misc_feature 1..50: note = Probe
  source 1..50: mol_type = other DNA

SEQ ID NO: 53467 - DNA, 25 bp, synthetic construct
  misc_feature 1..25: note = Probe
  source 1..25: mol_type = other DNA
cgccttttttcccggcggcgggaga

SEQ ID NO: 53468 - DNA, 26 bp, synthetic construct
  misc_feature 1..26: note = Probe
  source 1..26: mol_type = other DNA
cgccttttttcccggcggcgggagaa

SEQ ID NO: 53469 - DNA, 28 bp, synthetic construct
  misc_feature 1..28: note = Probe
  source 1..28: mol_type = other DNA
cgccttttttcccggcggcgggagaagt

SEQ ID NO: 53470 - DNA, 38 bp, synthetic construct; identical to SEQ ID NO: 5026
  misc_feature 1..38: note = Probe
  source 1..38: mol_type = other DNA

SEQ ID NO: 53471 - DNA, 31 bp, synthetic construct; identical to SEQ ID NO: 731
  misc_feature 1..31: note = Probe
  source 1..31: mol_type = other DNA

SEQ ID NO: 53472 - DNA, 38 bp, synthetic construct; identical to SEQ ID NO: 5037
  misc_feature 1..38: note = Probe
  source 1..38: mol_type = other DNA

SEQ ID NO: 53473 - DNA, 38 bp, synthetic construct
  misc_feature 1..38: note = Probe
  source 1..38: mol_type = other DNA
cgctctgagctaaacctagccccaaacccactccacct

SEQ ID NO: 53474 - DNA, 26 bp, synthetic construct
  misc_feature 1..26: note = Probe
  source 1..26: mol_type = other DNA
cgctggtgtagtggtatcatgcaaga

SEQ ID NO: 53475 - DNA, 44 bp, synthetic construct
  misc_feature 1..44: note = Probe
  source 1..44: mol_type = other DNA
cgctggtgtagtggtatcatgcaagattcccattcttgcgaccc

SEQ ID NO: 53476 - DNA, 25 bp, synthetic construct
  misc_feature 1..25: note = Probe
  source 1..25: mol_type = other DNA
cggaagcgtgctgggcccataaccc

SEQ ID NO: 53477 - DNA, 26 bp, synthetic construct
  misc_feature 1..26: note = Probe
  source 1..26: mol_type = other DNA
cggagatgaaaacctttttccaagga

SEQ ID NO: 53478 - DNA, 28 bp, synthetic construct
  misc_feature 1..28: note = Probe
  source 1..28: mol_type = other DNA
cggagatgaaaacctttttccaaggaca

SEQ ID NO: 53479 - DNA, 29 bp, synthetic construct
  misc_feature 1..29: note = Probe
  source 1..29: mol_type = other DNA
cggagatgaaaacctttttccaaggacaa

SEQ ID NO: 53480 - DNA, 30 bp, synthetic construct; identical to SEQ ID NO: 5060
  misc_feature 1..30: note = Probe
  source 1..30: mol_type = other DNA

SEQ ID NO: 53481 - DNA, 31 bp, synthetic construct; identical to SEQ ID NO: 5061
  misc_feature 1..31: note = Probe
  source 1..31: mol_type = other DNA

SEQ ID NO: 53482 - DNA, 32 bp, synthetic construct; identical to SEQ ID NO: 5062
  misc_feature 1..32: note = Probe
  source 1..32: mol_type = other DNA

SEQ ID NO: 53483 - DNA, 23 bp, synthetic construct
  misc_feature 1..23: note = Probe
  source 1..23: mol_type = other DNA
cggatagctcagtcggtagagca

SEQ ID NO: 53484 - DNA, 25 bp, synthetic construct
  misc_feature 1..25: note = Probe
  source 1..25: mol_type = other DNA
cggatagctcagtcggtagagcatc

SEQ ID NO: 53485 - DNA, 29 bp, synthetic construct
  misc_feature 1..29: note = Probe
  source 1..29: mol_type = other DNA
cggatagctcagtcggtagagcatcagac

SEQ ID NO: 53486 - DNA, 20 bp, synthetic construct
  misc_feature 1..20: note = Probe
  source 1..20: mol_type = other DNA
cggatcagaagattccaggt

SEQ ID NO: 53487 - DNA, 20 bp, synthetic construct
  misc_feature 1..20: note = Probe
  source 1..20: mol_type = other DNA
cggctagctcagtcggtaga

SEQ ID NO: 53488 - DNA, 21 bp, synthetic construct
  misc_feature 1..21: note = Probe
  source 1..21: mol_type = other DNA
cggctagctcagtcggtagag

SEQ ID NO: 53489 - DNA, 23 bp, synthetic construct
  misc_feature 1..23: note = Probe
  source 1..23: mol_type = other DNA
cggctagctcagtcggtagagca

SEQ ID NO: 53490 - DNA, 25 bp, synthetic construct
  misc_feature 1..25: note = Probe
  source 1..25: mol_type = other DNA
cggctagctcagtcggtagagcatg

SEQ ID NO: 53491 - DNA, 27 bp, synthetic construct
  misc_feature 1..27: note = Probe
  source 1..27: mol_type = other DNA
cggctagctcagtcggtagagcatgag

SEQ ID NO: 53492 - DNA, 30 bp, synthetic construct; identical to SEQ ID NO: 771
  misc_feature 1..30: note = Probe
  source 1..30: mol_type = other DNA

SEQ ID NO: 53493 - DNA, 31 bp, synthetic construct; identical to SEQ ID NO: 772
  misc_feature 1..31: note = Probe
  source 1..31: mol_type = other DNA

SEQ ID NO: 53494 - DNA, 26 bp, synthetic construct
  misc_feature 1..26: note = Probe
  source 1..26: mol_type = other DNA
cggctagctcagtcggtagagcatgg

SEQ ID NO: 53495 - DNA, 39 bp, synthetic construct; identical to SEQ ID NO: 19247
  misc_feature 1..39: note = Probe
  source 1..39: mol_type = other DNA

SEQ ID NO: 53496 - DNA, 46 bp, synthetic construct
  misc_feature 1..46: note = Probe
  source 1..46: mol_type = other DNA
cggctagctcagtcggtagagcatgggactcttaatcccagggtcg

SEQ ID NO: 53497 - DNA, 36 bp, synthetic construct; identical to SEQ ID NO: 5084
  misc_feature 1..36: note = Probe
  source 1..36: mol_type = other DNA

SEQ ID NO: 53498 - DNA, 16 bp, synthetic construct
  misc_feature 1..16: note = Probe
  source 1..16: mol_type = other DNA
cgggaggcccgggttt

SEQ ID NO: 53499 - DNA, 17 bp, synthetic construct
  misc_feature 1..17: note = Probe
  source 1..17: mol_type = other DNA
cgggaggcccgggtttg

SEQ ID NO: 53500 - DNA, 27 bp, synthetic construct
  misc_feature 1..27: note = Probe
  source 1..27: mol_type = other DNA
cgggctcacatcaccccataaacaaat

SEQ ID NO: 53501 - DNA, 22 bp, synthetic construct
  misc_feature 1..22: note = Probe
  source 1..22: mol_type = other DNA
cgggtgcgagaggtcccgggtt

SEQ ID NO: 53502 - DNA, 34 bp, synthetic construct; identical to SEQ ID NO: 790
  misc_feature 1..34: note = Probe
  source 1..34: mol_type = other DNA

SEQ ID NO: 53503 - DNA, 50 bp, synthetic construct; identical to SEQ ID NO: 791
  misc_feature 1..50: note = Probe
  source 1..50: mol_type = other DNA

SEQ ID NO: 53504 - DNA, 16 bp, synthetic construct
  misc_feature 1..16: note = Probe
  source 1..16: mol_type = other DNA
cggtagagcatgggac

SEQ ID NO: 53505 - DNA, 26 bp, synthetic construct
  misc_feature 1..26: note = Probe
  source 1..26: mol_type = other DNA
cggtagagcatgggactcttaatccc

SEQ ID NO: 53506 - DNA, 33 bp, synthetic construct; identical to SEQ ID NO: 5107
  misc_feature 1..33: note = Probe
  source 1..33: mol_type = other DNA

SEQ ID NO: 53507 - DNA, 19 bp, synthetic construct
  misc_feature 1..19: note = Probe
  source 1..19: mol_type = other DNA
cggtagcgcgtctgactcc

SEQ ID NO: 53508 - DNA, 16 bp, synthetic construct
  misc_feature 1..16: note = Probe
  source 1..16: mol_type = other DNA
cggttaggattcctgg

SEQ ID NO: 53509 - DNA, 22 bp, synthetic construct
  misc_feature 1..22: note = Probe
  source 1..22: mol_type = other DNA
cggttaggattcctggttttca

SEQ ID NO: 53510 - DNA, 24 bp, synthetic construct
  misc_feature 1..24: note = Probe
  source 1..24: mol_type = other DNA
cggttaggattcctggttttcacc

SEQ ID NO: 53511 - DNA, 25 bp, synthetic construct
  misc_feature 1..25: note = Probe
  source 1..25: mol_type = other DNA
cggttaggattcctggttttcaccc

SEQ ID NO: 53512 - DNA, 27 bp, synthetic construct
  misc_feature 1..27: note = Probe
  source 1..27: mol_type = other DNA
cggttaggattcctggttttcacccag

SEQ ID NO: 53513 - DNA, 33 bp, synthetic construct
  misc_feature 1..33: note = Probe
  source 1..33: mol_type = other DNA
cggttaggattcctggttttcacccaggcggcc

SEQ ID NO: 53514 - DNA, 35 bp, synthetic construct
  misc_feature 1..35: note = Probe
  source 1..35: mol_type = other DNA
cggttaggattcctggttttcacccaggcggcccg

SEQ ID NO: 53515 - DNA, 35 bp, synthetic construct
  misc_feature 1..35: note = Probe
  source 1..35: mol_type = other DNA
cggttaggattcctggttttcacccaggtggcccg

SEQ ID NO: 53516 - DNA, 21 bp, synthetic construct
  misc_feature 1..21: note = Probe
  source 1..21: mol_type = other DNA
cgtaaacaggagatcctgggt

SEQ ID NO: 53517 - DNA, 22 bp, synthetic construct
  misc_feature 1..22: note = Probe
  source 1..22: mol_type = other DNA
cgtaaacaggagatcctgggtt

SEQ ID NO: 53518 - DNA, 21 bp, synthetic construct
  misc_feature 1..21: note = Probe
  source 1..21: mol_type = other DNA
cgtaaaccgaagatcacgggt

SEQ ID NO: 53519 - DNA, 23 bp, synthetic construct
  misc_feature 1..23: note = Probe
  source 1..23: mol_type = other DNA
cgtagtgtagtggttatcacgtt

SEQ ID NO: 53520 - DNA, 26 bp, synthetic construct
  misc_feature 1..26: note = Probe
  source 1..26: mol_type = other DNA
cgtagtgtagtggttatcacgttcgc

SEQ ID NO: 53521 - DNA, 27 bp, synthetic construct
  misc_feature 1..27: note = Probe
  source 1..27: mol_type = other DNA
cgtagtgtagtggttatcacgttcgcc

SEQ ID NO: 53522 - DNA, 22 bp, synthetic construct
  misc_feature 1..22: note = Probe
  source 1..22: mol_type = other DNA
cgtccgtgcctgagacccgagg

SEQ ID NO: 53523 - DNA, 28 bp, synthetic construct
  misc_feature 1..28: note = Probe
  source 1..28: mol_type = other DNA
cgtggttgtagtccgtgcgagaataatg

SEQ ID NO: 53524 - DNA, 50 bp, synthetic construct; identical to SEQ ID NO: 5125
  misc_feature 1..50: note = Probe
  source 1..50: mol_type = other DNA

SEQ ID NO: 53525 - DNA, 29 bp, synthetic construct
  misc_feature 1..29: note = Probe
  source 1..29: mol_type = other DNA
ctaaacctagccccaaacccactccacct

SEQ ID NO: 53526 - DNA, 25 bp, synthetic construct
  misc_feature 1..25: note = Probe
  source 1..25: mol_type = other DNA
ctaaagacaggggttaggcctcttt

SEQ ID NO: 53527 - DNA, 26 bp, synthetic construct
  misc_feature 1..26: note = Probe
  source 1..26: mol_type = other DNA
ctaaagacaggggttaggcctctttt

SEQ ID NO: 53528 - DNA, 27 bp, synthetic construct
  misc_feature 1..27: note = Probe
  source 1..27: mol_type = other DNA
ctaaagacaggggttaggcctcttttt

SEQ ID NO: 53529 - DNA, 31 bp, synthetic construct; identical to SEQ ID NO: 5142
  misc_feature 1..31: note = Probe
  source 1..31: mol_type = other DNA

SEQ ID NO: 53530 - DNA, 32 bp, synthetic construct; identical to SEQ ID NO: 5143
  misc_feature 1..32: note = Probe
  source 1..32: mol_type = other DNA

SEQ ID NO: 53531 - DNA, 33 bp, synthetic construct; identical to SEQ ID NO: 5144
  misc_feature 1..33: note = Probe
  source 1..33: mol_type = other DNA

SEQ ID NO: 53532 - DNA, 34 bp, synthetic construct; identical to SEQ ID NO: 5145
  misc_feature 1..34: note = Probe
  source 1..34: mol_type = other DNA

SEQ ID NO: 53533 - DNA, 33 bp, synthetic construct; identical to SEQ ID NO: 5152
  misc_feature 1..33: note = Probe
  source 1..33: mol_type = other DNA

SEQ ID NO: 53534 - DNA, 22 bp, synthetic construct
  misc_feature 1..22: note = Probe
  source 1..22: mol_type = other DNA
ctaaatcctatatatcttaatg

SEQ ID NO: 53535 - DNA, 23 bp, synthetic construct
  misc_feature 1..23: note = Probe
  source 1..23: mol_type = other DNA
ctaacaacatggctttctcaact

SEQ ID NO: 53536 - DNA, 19 bp, synthetic construct
  misc_feature 1..19: note = Probe
  source 1..19: mol_type = other DNA
ctaacacgcgaaaggtccc

SEQ ID NO: 53537 - DNA, 23 bp, synthetic construct
  misc_feature 1..23: note = Probe
  source 1..23: mol_type = other DNA
ctaacacgcgaaaggtccccggt

SEQ ID NO: 53538 - DNA, 33 bp, synthetic construct; identical to SEQ ID NO: 5158
  misc_feature 1..33: note = Probe
  source 1..33: mol_type = other DNA

SEQ ID NO: 53539 - DNA, 34 bp, synthetic construct; identical to SEQ ID NO: 5159
  misc_feature 1..34: note = Probe
  source 1..34: mol_type = other DNA

SEQ ID NO: 53540 - DNA, 35 bp, synthetic construct; identical to SEQ ID NO: 5160
  misc_feature 1..35: note = Probe
  source 1..35: mol_type = other DNA

SEQ ID NO: 53541 - DNA, 36 bp, synthetic construct; identical to SEQ ID NO: 5161
  misc_feature 1..36: note = Probe
  source 1..36: mol_type = other DNA

SEQ ID NO: 53542 - DNA, 37 bp, synthetic construct; identical to SEQ ID NO: 5162
  misc_feature 1..37: note = Probe
  source 1..37: mol_type = other DNA

SEQ ID NO: 53543 - DNA, 38 bp, synthetic construct; identical to SEQ ID NO: 5163
  misc_feature 1..38: note = Probe
  source 1..38: mol_type = other DNA

SEQ ID NO: 53544 - DNA, 39 bp, synthetic construct; identical to SEQ ID NO: 5164
  misc_feature 1..39: note = Probe
  source 1..39: mol_type = other DNA

SEQ ID NO: 53545 - DNA, 40 bp, synthetic construct; identical to SEQ ID NO: 5165
  misc_feature 1..40: note = Probe
  source 1..40: mol_type = other DNA

SEQ ID NO: 53546 - DNA, 41 bp, synthetic construct; identical to SEQ ID NO: 5166
  misc_feature 1..41: note = Probe
  source 1..41: mol_type = other DNA

SEQ ID NO: 53547 - DNA, 42 bp, synthetic construct; identical to SEQ ID NO: 5167
  misc_feature 1..42: note = Probe
  source 1..42: mol_type = other DNA

SEQ ID NO: 53548 - DNA, 23 bp, synthetic construct
  misc_feature 1..23: note = Probe
  source 1..23: mol_type = other DNA
ctaagccagggattgtgggttcg

SEQ ID NO: 53549 - DNA, 24 bp, synthetic construct
  misc_feature 1..24: note = Probe
  source 1..24: mol_type = other DNA
ctaagccagggattgtgggttcga

SEQ ID NO: 53550 - DNA, 38 bp, synthetic construct; identical to SEQ ID NO: 5173
  misc_feature 1..38: note = Probe
  source 1..38: mol_type = other DNA

SEQ ID NO: 53551 - DNA, 19 bp, synthetic construct
  misc_feature 1..19: note = Probe
  source 1..19: mol_type = other DNA
ctaataacgccaaggtcgc

SEQ ID NO: 53552 - DNA, 23 bp, synthetic construct
  misc_feature 1..23: note = Probe
  source 1..23: mol_type = other DNA
ctaataacgccaaggtcgcgggt

SEQ ID NO: 53553 - DNA, 24 bp, synthetic construct
  misc_feature 1..24: note = Probe
  source 1..24: mol_type = other DNA
ctaataacgccaaggtcgcgggtt

SEQ ID NO: 53554 - DNA, 50 bp, synthetic construct; identical to SEQ ID NO: 806
  misc_feature 1..50: note = Probe
  source 1..50: mol_type = other DNA

SEQ ID NO: 53555 - DNA, 18 bp, synthetic construct
  misc_feature 1..18: note = Probe
  source 1..18: mol_type = other DNA
ctaatggataaggcactg

SEQ ID NO: 53556 - DNA, 34 bp, synthetic construct; identical to SEQ ID NO: 19454
  misc_feature 1..34: note = Probe
  source 1..34: mol_type = other DNA

SEQ ID NO: 53557 - DNA, 23 bp, synthetic construct
  misc_feature 1..23: note = Probe
  source 1..23: mol_type = other DNA
ctacggatcagaagattccaggt

SEQ ID NO: 53558 - DNA, 24 bp, synthetic construct
  misc_feature 1..24: note = Probe
  source 1..24: mol_type = other DNA
ctacggatcagaagattccaggtt

SEQ ID NO: 53559 - DNA, 23 bp, synthetic construct
  misc_feature 1..23: note = Probe
  source 1..23: mol_type = other DNA
ctacggatcagaagattctaggt

SEQ ID NO: 53560 - DNA, 24 bp, synthetic construct
  misc_feature 1..24: note = Probe
  source 1..24: mol_type = other DNA
ctacggatcagaagattctaggtt

SEQ ID NO: 53561 - DNA, 23 bp, synthetic construct
  misc_feature 1..23: note = Probe
  source 1..23: mol_type = other DNA
ctagccccaaacccactccacct

SEQ ID NO: 53562 - DNA, 25 bp, synthetic construct
  misc_feature 1..25: note = Probe
  source 1..25: mol_type = other DNA
ctagctcagtcggtagagcatggga

SEQ ID NO: 53563 - DNA, 26 bp, synthetic construct
  misc_feature 1..26: note = Probe
  source 1..26: mol_type = other DNA
ctagctcagtcggtagagcatgggac

SEQ ID NO: 53564 - DNA, 27 bp, synthetic construct
  misc_feature 1..27: note = Probe
  source 1..27: mol_type = other DNA
ctagctcagtcggtagagcatgggact

SEQ ID NO: 53565 - DNA, 19 bp, synthetic construct
  misc_feature 1..19: note = Probe
  source 1..19: mol_type = other DNA
ctaggggtatgattctcgc

SEQ ID NO: 53566 - DNA, 38 bp, synthetic construct; identical to SEQ ID NO: 19477
  misc_feature 1..38: note = Probe
  source 1..38: mol_type = other DNA

SEQ ID NO: 53567 - DNA, 26 bp, synthetic construct
  misc_feature 1..26: note = Probe
  source 1..26: mol_type = other DNA
ctagtggttaggattcggcgctctca

SEQ ID NO: 53568 - DNA, 42 bp, synthetic construct
  misc_feature 1..42: note = Probe
  source 1..42: mol_type = other DNA
ctagtggttaggattcggcgctctcaccgccgcggcccgggt

SEQ ID NO: 53569 - DNA, 50 bp, synthetic construct; identical to SEQ ID NO: 5191
  misc_feature 1..50: note = Probe
  source 1..50: mol_type = other DNA

SEQ ID NO: 53570 - DNA, 23 bp, synthetic construct
  misc_feature 1..23: note = Probe
  source 1..23: mol_type = other DNA
ctcacaagaactgctaactcatg

SEQ ID NO: 53571 - DNA, 19 bp, synthetic construct
  misc_feature 1..19: note = Probe
  source 1..19: mol_type = other DNA
ctcacacgcgaaaggtccc

SEQ ID NO: 53572 - DNA, 20 bp, synthetic construct
  misc_feature 1..20: note = Probe
  source 1..20: mol_type = other DNA
ctcacacgcgaaaggtcccc

SEQ ID NO: 53573 - DNA, 23 bp, synthetic construct
  misc_feature 1..23: note = Probe
  source 1..23: mol_type = other DNA
ctcacatcaccccataaacaaat

SEQ ID NO: 53574 - DNA, 16 bp, synthetic construct
  misc_feature 1..16: note = Probe
  source 1..16: mol_type = other DNA
ctcaccgccgcggccc

SEQ ID NO: 53575 - DNA, 17 bp, synthetic construct
  misc_feature 1..17: note = Probe
  source 1..17: mol_type = other DNA
ctcaccgccgcggcccg

SEQ ID NO: 53576 - DNA, 22 bp, synthetic construct
  misc_feature 1..22: note = Probe
  source 1..22: mol_type = other DNA
ctcaccgccgcggcccgggttc

SEQ ID NO: 53577 - DNA, 19 bp, synthetic construct
  misc_feature 1..19: note = Probe
  source 1..19: mol_type = other DNA
ctcacctggagcatgtttt

SEQ ID NO: 53578 - DNA, 20 bp, synthetic construct
  misc_feature 1..20: note = Probe
  source 1..20: mol_type = other DNA
ctcacctggagcatgttttc

SEQ ID NO: 53579 - DNA, 21 bp, synthetic construct
  misc_feature 1..21: note = Probe
  source 1..21: mol_type = other DNA
ctcacctggagcatgttttct

SEQ ID NO: 53580 - DNA, 22 bp, synthetic construct
  misc_feature 1..22: note = Probe
  source 1..22: mol_type = other DNA
ctcacctggagcatgttttctt

SEQ ID NO: 53581 - DNA, 23 bp, synthetic construct
  misc_feature 1..23: note = Probe
  source 1..23: mol_type = other DNA
ctcacctggagcatgttttcttc

SEQ ID NO: 53582 - DNA, 35 bp, synthetic construct; identical to SEQ ID NO: 5220
  misc_feature 1..35: note = Probe
  source 1..35: mol_type = other DNA

SEQ ID NO: 53583 - DNA, 23 bp, synthetic construct
  misc_feature 1..23: note = Probe
  source 1..23: mol_type = other DNA
ctcataatctgaaggtcctgagt

SEQ ID NO: 53584 - DNA, 17 bp, synthetic construct
  misc_feature 1..17: note = Probe
  source 1..17: mol_type = other DNA
ctcatgcccccatgtct

SEQ ID NO: 53585 - DNA, 18 bp, synthetic construct
  misc_feature 1..18: note = Probe
  source 1..18: mol_type = other DNA
ctcatgcccccatgtcta

SEQ ID NO: 53586 - DNA, 21 bp, synthetic construct
  misc_feature 1..21: note = Probe
  source 1..21: mol_type = other DNA
ctcatgcccccatgtctaaca

SEQ ID NO: 53587 - DNA, 29 bp, synthetic construct
  misc_feature 1..29: note = Probe
  source 1..29: mol_type = other DNA
ctcatgcccccatgtctaacaacatggct

SEQ ID NO: 53588 - DNA, 30 bp, synthetic construct; identical to SEQ ID NO: 5236
  misc_feature 1..30: note = Probe
  source 1..30: mol_type = other DNA

SEQ ID NO: 53589 - DNA, 31 bp, synthetic construct; identical to SEQ ID NO: 5237
  misc_feature 1..31: note = Probe
  source 1..31: mol_type = other DNA

SEQ ID NO: 53590 - DNA, 32 bp, synthetic construct; identical to SEQ ID NO: 5238
  misc_feature 1..32: note = Probe
  source 1..32: mol_type = other DNA

SEQ ID NO: 53591 - DNA, 33 bp, synthetic construct; identical to SEQ ID NO: 5239
  misc_feature 1..33: note = Probe
  source 1..33: mol_type = other DNA

SEQ ID NO: 53592 - DNA, 34 bp, synthetic construct; identical to SEQ ID NO: 5240
  misc_feature 1..34: note = Probe
  source 1..34: mol_type = other DNA

SEQ ID NO: 53593 - DNA, 35 bp, synthetic construct; identical to SEQ ID NO: 5241
  misc_feature 1..35: note = Probe
  source 1..35: mol_type = other DNA

SEQ ID NO: 53594 - DNA, 36 bp, synthetic construct; identical to SEQ ID NO: 5242
  misc_feature 1..36: note = Probe
  source 1..36: mol_type = other DNA

SEQ ID NO: 53595 - DNA, 37 bp, synthetic construct; identical to SEQ ID NO: 5243
  misc_feature 1..37: note = Probe
  source 1..37: mol_type = other DNA

SEQ ID NO: 53596 - DNA, 38 bp, synthetic construct; identical to SEQ ID NO: 5244
  misc_feature 1..38: note = Probe
  source 1..38: mol_type = other DNA

SEQ ID NO: 53597 - DNA, 39 bp, synthetic construct; identical to SEQ ID NO: 19541
  misc_feature 1..39: note = Probe
  source 1..39: mol_type = other DNA

SEQ ID NO: 53598 - DNA, 34 bp, synthetic construct; identical to SEQ ID NO: 5247
  misc_feature 1..34: note = Probe
  source 1..34: mol_type = other DNA

SEQ ID NO: 53599 - DNA, 24 bp, synthetic construct
  misc_feature 1..24: note = Probe
  source 1..24: mol_type = other DNA
ctccagatcagaaggttgcgtgtt

SEQ ID NO: 53600 - DNA, 16 bp, synthetic construct
  misc_feature 1..16: note = Probe
  source 1..16: mol_type = other DNA
ctcccgccttttttcc

SEQ ID NO: 53601 - DNA, 17 bp, synthetic construct
  misc_feature 1..17: note = Probe
  source 1..17: mol_type = other DNA
ctcccgccttttttccc

SEQ ID NO: 53602 - DNA, 18 bp, synthetic construct
  misc_feature 1..18: note = Probe
  source 1..18: mol_type = other DNA
ctcccgccttttttcccg

SEQ ID NO: 53603 - DNA, 19 bp, synthetic construct
  misc_feature 1..19: note = Probe
  source 1..19: mol_type = other DNA
ctcccgccttttttcccgg

SEQ ID NO: 53604 - DNA, 20 bp, synthetic construct
  misc_feature 1..20: note = Probe
  source 1..20: mol_type = other DNA
ctcccgccttttttcccggc

SEQ ID NO: 53605 - DNA, 21 bp, synthetic construct
  misc_feature 1..21: note = Probe
  source 1..21: mol_type = other DNA
ctcccgccttttttcccggcg

SEQ ID NO: 53606 - DNA, 22 bp, synthetic construct
  misc_feature 1..22: note = Probe
  source 1..22: mol_type = other DNA
ctcccgccttttttcccggcgg

SEQ ID NO: 53607 - DNA, 23 bp, synthetic construct
  misc_feature 1..23: note = Probe
  source 1..23: mol_type = other DNA
ctcccgccttttttcccggcggc

SEQ ID NO: 53608 - DNA, 24 bp, synthetic construct
  misc_feature 1..24: note = Probe
  source 1..24: mol_type = other DNA
ctcccgccttttttcccggcggcg

SEQ ID NO: 53609 - DNA, 26 bp, synthetic construct
  misc_feature 1..26: note = Probe
  source 1..26: mol_type = other DNA
ctcccgccttttttcccggcggcggg

SEQ ID NO: 53610 - DNA, 27 bp, synthetic construct
  misc_feature 1..27: note = Probe
  source 1..27: mol_type = other DNA
ctcccgccttttttcccggcggcggga

SEQ ID NO: 53611 - DNA, 28 bp, synthetic construct
  misc_feature 1..28: note = Probe
  source 1..28: mol_type = other DNA
ctcccgccttttttcccggcggcgggag

SEQ ID NO: 53612 - DNA, 29 bp, synthetic construct
  misc_feature 1..29: note = Probe
  source 1..29: mol_type = other DNA
ctcccgccttttttcccggcggcgggaga

SEQ ID NO: 53613 - DNA, 30 bp, synthetic construct; identical to SEQ ID NO: 5265
  misc_feature 1..30: note = Probe
  source 1..30: mol_type = other DNA

SEQ ID NO: 53614 - DNA, 18 bp, synthetic construct
  misc_feature 1..18: note = Probe
  source 1..18: mol_type = other DNA
ctcccggtatgggaacaa

SEQ ID NO: 53615 - DNA, 17 bp, synthetic construct
  misc_feature 1..17: note = Probe
  source 1..17: mol_type = other DNA
ctcccggtgtgggaacg

SEQ ID NO: 53616 - DNA, 18 bp, synthetic construct
  misc_feature 1..18: note = Probe
  source 1..18: mol_type = other DNA
ctcccggtgtgggaacgc

SEQ ID NO: 53617 - DNA, 23 bp, synthetic construct
  misc_feature 1..23: note = Probe
  source 1..23: mol_type = other DNA
ctcctaagccagggattgtgggt

SEQ ID NO: 53618 - DNA, 27 bp, synthetic construct
  misc_feature 1..27: note = Probe
  source 1..27: mol_type = other DNA
ctcgcctgccacgcgggaggcccgggt

SEQ ID NO: 53619 - DNA, 18 bp, synthetic construct
  misc_feature 1..18: note = Probe
  source 1..18: mol_type = other DNA
ctctcaccgccgcggccc

SEQ ID NO: 53620 - DNA, 20 bp, synthetic construct
  misc_feature 1..20: note = Probe
  source 1..20: mol_type = other DNA
ctctgaatccagcgatccga

SEQ ID NO: 53621 - DNA, 23 bp, synthetic construct
  misc_feature 1..23: note = Probe
  source 1..23: mol_type = other DNA
ctctgaatccagcgatccgagtt

SEQ ID NO: 53622 - DNA, 50 bp, synthetic construct; identical to SEQ ID NO: 5278
  misc_feature 1..50: note = Probe
  source 1..50: mol_type = other DNA

SEQ ID NO: 53623 - DNA, 16 bp, synthetic construct
  misc_feature 1..16: note = Probe
  source 1..16: mol_type = other DNA
ctgaaggtcgtgagtt

SEQ ID NO: 53624 - DNA, 17 bp, synthetic construct
  misc_feature 1..17: note = Probe
  source 1..17: mol_type = other DNA
ctgaaggtcgtgagttc

SEQ ID NO: 53625 - DNA, 18 bp, synthetic construct
  misc_feature 1..18: note = Probe
  source 1..18: mol_type = other DNA
ctgaatccagcgatccga

SEQ ID NO: 53626 - DNA, 19 bp, synthetic construct
  misc_feature 1..19: note = Probe
  source 1..19: mol_type = other DNA
ctgaatccagcgatccgag

SEQ ID NO: 53627 - DNA, 22 bp, synthetic construct
  misc_feature 1..22: note = Probe
  source 1..22: mol_type = other DNA
ctgaatccagcgatccgagttc

SEQ ID NO: 53628 - DNA, 23 bp, synthetic construct
  misc_feature 1..23: note = Probe
  source 1..23: mol_type = other DNA
ctgaatccagcgatccgagttca

SEQ ID NO: 53629 - DNA, 39 bp, synthetic construct; identical to SEQ ID NO: 833
  misc_feature 1..39: note = Probe
  source 1..39: mol_type = other DNA

SEQ ID NO: 53630 - DNA, 40 bp, synthetic construct
  misc_feature 1..40: note = Probe
  source 1..40: mol_type = other DNA
ctgaatccagcgatccgagttcaaatctcggtggaacctg

SEQ ID NO: 53631 - DNA, 41 bp, synthetic construct; identical to SEQ ID NO: 5290
  misc_feature 1..41: note = Probe
  source 1..41: mol_type = other DNA

SEQ ID NO: 53632 - DNA, 42 bp, synthetic construct; identical to SEQ ID NO: 5291
  misc_feature 1..42: note = Probe
  source 1..42: mol_type = other DNA

SEQ ID NO: 53633 - DNA, 41 bp, synthetic construct; identical to SEQ ID NO: 5292
  misc_feature 1..41: note = Probe
  source 1..41: mol_type = other DNA

SEQ ID NO: 53634 - DNA, 40 bp, synthetic construct
  misc_feature 1..40: note = Probe
  source 1..40: mol_type = other DNA
ctgaatccagcgatccgagttcaaatctcggtggaacctt

SEQ ID NO: 53635 - DNA, 41 bp, synthetic construct; identical to SEQ ID NO: 5293
  misc_feature 1..41: note = Probe
  source 1..41: mol_type = other DNA

SEQ ID NO: 53636 - DNA, 26 bp, synthetic construct
  misc_feature 1..26: note = Probe
  source 1..26: mol_type = other DNA
ctgacaacagaggcttacgacccctt

SEQ ID NO: 53637 - DNA, 34 bp, synthetic construct; identical to SEQ ID NO: 5298
  misc_feature 1..34: note = Probe
  source 1..34: mol_type = other DNA

SEQ ID NO: 53638 - DNA, 35 bp, synthetic construct; identical to SEQ ID NO: 5299
  misc_feature 1..35: note = Probe
  source 1..35: mol_type = other DNA

SEQ ID NO: 53639 - DNA, 36 bp, synthetic construct; identical to SEQ ID NO: 5300
  misc_feature 1..36: note = Probe
  source 1..36: mol_type = other DNA

SEQ ID NO: 53640 - DNA, 50 bp, synthetic construct; identical to SEQ ID NO: 5306
  misc_feature 1..50: note = Probe
  source 1..50: mol_type = other DNA

SEQ ID NO: 53641 - DNA, 24 bp, synthetic construct
  misc_feature 1..24: note = Probe
  source 1..24: mol_type = other DNA
ctgccacgcgggaggcccgggttc

SEQ ID NO: 53642 - DNA, 24 bp, synthetic construct
  misc_feature 1..24: note = Probe
  source 1..24: mol_type = other DNA
ctgccacgcgggaggcccgggttt

SEQ ID NO: 53643 - DNA, 25 bp, synthetic construct
  misc_feature 1..25: note = Probe
  source 1..25: mol_type = other DNA
ctgccacgcgggaggcccgggtttg

SEQ ID NO: 53644 - DNA, 26 bp, synthetic construct
  misc_feature 1..26: note = Probe
  source 1..26: mol_type = other DNA
ctgccacgcgggaggcccgggtttga

SEQ ID NO: 53645 - DNA, 30 bp, synthetic construct; identical to SEQ ID NO: 5308
  misc_feature 1..30: note = Probe
  source 1..30: mol_type = other DNA

SEQ ID NO: 53646 - DNA, 36 bp, synthetic construct; identical to SEQ ID NO: 5314
  misc_feature 1..36: note = Probe
  source 1..36: mol_type = other DNA

SEQ ID NO: 53647 - DNA, 37 bp, synthetic construct; identical to SEQ ID NO: 5315
  misc_feature 1..37: note = Probe
  source 1..37: mol_type = other DNA

SEQ ID NO: 53648 - DNA, 38 bp, synthetic construct; identical to SEQ ID NO: 5316
  misc_feature 1..38: note = Probe
  source 1..38: mol_type = other DNA

SEQ ID NO: 53649 - DNA, 39 bp, synthetic construct; identical to SEQ ID NO: 5317
  misc_feature 1..39: note = Probe
  source 1..39: mol_type = other DNA

SEQ ID NO: 53650 - DNA, 40 bp, synthetic construct; identical to SEQ ID NO: 5318
  misc_feature 1..40: note = Probe
  source 1..40: mol_type = other DNA

SEQ ID NO: 53651 - DNA, 41 bp, synthetic construct; identical to SEQ ID NO: 5319
  misc_feature 1..41: note = Probe
  source 1..41: mol_type = other DNA

SEQ ID NO: 53652 - DNA, 43 bp, synthetic construct; identical to SEQ ID NO: 5321
  misc_feature 1..43: note = Probe
  source 1..43: mol_type = other DNA

SEQ ID NO: 53653 - DNA, 44 bp, synthetic construct; identical to SEQ ID NO: 5322
  misc_feature 1..44: note = Probe
  source 1..44: mol_type = other DNA

SEQ ID NO: 53654 - DNA, 45 bp, synthetic construct; identical to SEQ ID NO: 5323
  misc_feature 1..45: note = Probe
  source 1..45: mol_type = other DNA

SEQ ID NO: 53655 - DNA, 28 bp, synthetic construct
  misc_feature 1..28: note = Probe
  source 1..28: mol_type = other DNA
ctgtagtgtagtggttatcacgttcgcc

SEQ ID NO: 53656 - DNA, 16 bp, synthetic construct
  misc_feature 1..16: note = Probe
  source 1..16: mol_type = other DNA
ctgtcacgcgggagac

SEQ ID NO: 53657 - DNA, 21 bp, synthetic construct
  misc_feature 1..21: note = Probe
  source 1..21: mol_type = other DNA
ctgtcacgcgggagaccgggg

SEQ ID NO: 53658 - DNA, 24 bp, synthetic construct
  misc_feature 1..24: note = Probe
  source 1..24: mol_type = other DNA
ctgtcacgcgggagaccggggttc

SEQ ID NO: 53659 - DNA, 25 bp, synthetic construct
  misc_feature 1..25: note = Probe
  source 1..25: mol_type = other DNA
ctgtcacgcgggagaccggggttca

SEQ ID NO: 53660 - DNA, 26 bp, synthetic construct
  misc_feature 1..26: note = Probe
  source 1..26: mol_type = other DNA
ctgtcacgcgggagaccggggttcaa

SEQ ID NO: 53661 - DNA, 25 bp, synthetic construct
  misc_feature 1..25: note = Probe
  source 1..25: mol_type = other DNA
ctgtcacgcgggagaccggggttcg

SEQ ID NO: 53662 - DNA, 44 bp, synthetic construct; identical to SEQ ID NO: 5340
  misc_feature 1..44: note = Probe
  source 1..44: mol_type = other DNA

SEQ ID NO: 53663 - DNA, 27 bp, synthetic construct
  misc_feature 1..27: note = Probe
  source 1..27: mol_type = other DNA
ctgtctagtaaacaggagatcctgggt

SEQ ID NO: 53664 - DNA, 27 bp, synthetic construct
  misc_feature 1..27: note = Probe
  source 1..27: mol_type = other DNA
ctgtctcgtaaacaggagatcctgggt

SEQ ID NO: 53665 - DNA, 27 bp, synthetic construct
  misc_feature 1..27: note = Probe
  source 1..27: mol_type = other DNA
ctgtcttgtaaacaggagatcctgggt

SEQ ID NO: 53666 - DNA, 22 bp, synthetic construct
  misc_feature 1..22: note = Probe
  source 1..22: mol_type = other DNA
ctgtgctccggagttacctcgt

SEQ ID NO: 53667 - DNA, 23 bp, synthetic construct
  misc_feature 1..23: note = Probe
  source 1..23: mol_type = other DNA
ctgtgctccggagttacctcgtt

SEQ ID NO: 53668 - DNA, 24 bp, synthetic construct
  misc_feature 1..24: note = Probe
  source 1..24: mol_type = other DNA
ctgtgctccggagttacctcgttt

SEQ ID NO: 53669 - DNA, 25 bp, synthetic construct
  misc_feature 1..25: note = Probe
  source 1..25: mol_type = other DNA
ctgtgctccggagttacctcgtttt

SEQ ID NO: 53670 - DNA, 19 bp, synthetic construct
  misc_feature 1..19: note = Probe
  source 1..19: mol_type = other DNA
ctgttaaccgaaaggttgg

SEQ ID NO: 53671 - DNA, 45 bp, synthetic construct; identical to SEQ ID NO: 5346
  misc_feature 1..45: note = Probe
  source 1..45: mol_type = other DNA

SEQ ID NO: 53672 - DNA, 40 bp, synthetic construct; identical to SEQ ID NO: 5351
  misc_feature 1..40: note = Probe
  source 1..40: mol_type = other DNA

SEQ ID NO: 53673 - DNA, 41 bp, synthetic construct; identical to SEQ ID NO: 5352
  misc_feature 1..41: note = Probe
  source 1..41: mol_type = other DNA

SEQ ID NO: 53674 - DNA, 42 bp, synthetic construct; identical to SEQ ID NO: 5353
  misc_feature 1..42: note = Probe
  source 1..42: mol_type = other DNA

SEQ ID NO: 53675 - DNA, 45 bp, synthetic construct; identical to SEQ ID NO: 5355
  misc_feature 1..45: note = Probe
  source 1..45: mol_type = other DNA

SEQ ID NO: 53676 - DNA, 22 bp, synthetic construct
  misc_feature 1..22: note = Probe
  source 1..22: mol_type = other DNA
cttaacttgaccgctctgagct

SEQ ID NO: 53677 - DNA, 43 bp, synthetic construct; identical to SEQ ID NO: 5372
  misc_feature 1..43: note = Probe
  source 1..43: mol_type = other DNA

SEQ ID NO: 53678 - DNA, 44 bp, synthetic construct; identical to SEQ ID NO: 5373
  misc_feature 1..44: note = Probe
  source 1..44: mol_type = other DNA

SEQ ID NO: 53679 - DNA, 39 bp, synthetic construct; identical to SEQ ID NO: 5377
  misc_feature 1..39: note = Probe
  source 1..39: mol_type = other DNA

SEQ ID NO: 53680 - DNA, 50 bp, synthetic construct; identical to SEQ ID NO: 850
  misc_feature 1..50: note = Probe
  source 1..50: mol_type = other DNA

SEQ ID NO: 53681 - DNA, 50 bp, synthetic construct; identical to SEQ ID NO: 5380
  misc_feature 1..50: note = Probe
  source 1..50: mol_type = other DNA

SEQ ID NO: 53682 - DNA, 50 bp, synthetic construct; identical to SEQ ID NO: 5381
  misc_feature 1..50: note = Probe
  source 1..50: mol_type = other DNA

SEQ ID NO: 53683 - DNA, 28 bp, synthetic construct
  misc_feature 1..28: note = Probe
  source 1..28: mol_type = other DNA
cttaggagatttcaacttaacttgaccg

SEQ ID NO: 53684 - DNA, 37 bp, synthetic construct; identical to SEQ ID NO: 5391
  misc_feature 1..37: note = Probe
  source 1..37: mol_type = other DNA

SEQ ID NO: 53685 - DNA, 44 bp, synthetic construct; identical to SEQ ID NO: 47651
  misc_feature 1..44: note = Probe
  source 1..44: mol_type = other DNA

SEQ ID NO: 53686 - DNA, 16 bp, synthetic construct
  misc_feature 1..16: note = Probe
  source 1..16: mol_type = other DNA
cttccaagcagttgac

SEQ ID NO: 53687 - DNA, 22 bp, synthetic construct
  misc_feature 1..22: note = Probe
  source 1..22: mol_type = other DNA
cttccaagcagttgacccgggt

SEQ ID NO: 53688 - DNA, 23 bp, synthetic construct
  misc_feature 1..23: note = Probe
  source 1..23: mol_type = other DNA
cttccaagcagttgacccgggtt

SEQ ID NO: 53689 - DNA, 24 bp, synthetic construct
  misc_feature 1..24: note = Probe
  source 1..24: mol_type = other DNA
cttccaagcagttgacccgggttc

SEQ ID NO: 53690 - DNA, 25 bp, synthetic construct
  misc_feature 1..25: note = Probe
  source 1..25: mol_type = other DNA
cttccaagcagttgacccgggttcg

SEQ ID NO: 53691 - DNA, 27 bp, synthetic construct
  misc_feature 1..27: note = Probe
  source 1..27: mol_type = other DNA
cttccaagcagttgacccgggttcgat

SEQ ID NO: 53692 - DNA, 41 bp, synthetic construct; identical to SEQ ID NO: 19749
  misc_feature 1..41: note = Probe
  source 1..41: mol_type = other DNA

SEQ ID NO: 53693 - DNA, 43 bp, synthetic construct; identical to SEQ ID NO: 5395
  misc_feature 1..43: note = Probe
  source 1..43: mol_type = other DNA

SEQ ID NO: 53694 - DNA, 40 bp, synthetic construct; identical to SEQ ID NO: 5396
  misc_feature 1..40: note = Probe
  source 1..40: mol_type = other DNA

SEQ ID NO: 53695 - DNA, 18 bp, synthetic construct
  misc_feature 1..18: note = Probe
  source 1..18: mol_type = other DNA
ctttacagtcagaggttc

SEQ ID NO: 53696 - DNA, 28 bp, synthetic construct
  misc_feature 1..28: note = Probe
  source 1..28: mol_type = other DNA
ctttacagtcagaggttcaattcctctt

SEQ ID NO: 53697 - DNA, 29 bp, synthetic construct
  misc_feature 1..29: note = Probe
  source 1..29: mol_type = other DNA
ctttacagtcagaggttcaattcctcttc

SEQ ID NO: 53698 - DNA, 30 bp, synthetic construct; identical to SEQ ID NO: 19761
  misc_feature 1..30: note = Probe
  source 1..30: mol_type = other DNA

SEQ ID NO: 53699 - DNA, 31 bp, synthetic construct
  misc_feature 1..31: note = Probe
  source 1..31: mol_type = other DNA
ctttacagtcagaggttcaattcctcttctt

SEQ ID NO: 53700 - DNA, 32 bp, synthetic construct; identical to SEQ ID NO: 39926
  misc_feature 1..32: note = Probe
  source 1..32: mol_type = other DNA

SEQ ID NO: 53701 - DNA, 34 bp, synthetic construct
  misc_feature 1..34: note = Probe
  source 1..34: mol_type = other DNA
ctttacagtcagaggttcaattcctcttcttaac

SEQ ID NO: 53702 - DNA, 35 bp, synthetic construct; identical to SEQ ID NO: 19762
  misc_feature 1..35: note = Probe
  source 1..35: mol_type = other DNA

SEQ ID NO: 53703 - DNA, 37 bp, synthetic construct; identical to SEQ ID NO: 5399
  misc_feature 1..37: note = Probe
  source 1..37: mol_type = other DNA

SEQ ID NO: 53704 - DNA, 38 bp, synthetic construct; identical to SEQ ID NO: 5400
  misc_feature 1..38: note = Probe
  source 1..38: mol_type = other DNA

SEQ ID NO: 53705 - DNA, 22 bp, synthetic construct
  misc_feature 1..22: note = Probe
  source 1..22: mol_type = other DNA
ctttgaatccagcgatccgagt

SEQ ID NO: 53706 - DNA, 46 bp, synthetic construct; identical to SEQ ID NO: 5403
  misc_feature 1..46: note = Probe
  source 1..46: mol_type = other DNA

SEQ ID NO: 53707 - DNA, 50 bp, synthetic construct; identical to SEQ ID NO: 5404
  misc_feature 1..50: note = Probe
  source 1..50: mol_type = other DNA

SEQ ID NO: 53708 - DNA, 43 bp, synthetic construct; identical to SEQ ID NO: 5406
  misc_feature 1..43: note = Probe
  source 1..43: mol_type = other DNA

SEQ ID NO: 53709 - DNA, 48 bp, synthetic construct; identical to SEQ ID NO: 47680
  misc_feature 1..48: note = Probe
  source 1..48: mol_type = other DNA

SEQ ID NO: 53710 - DNA, 49 bp, synthetic construct; identical to SEQ ID NO: 5407
  misc_feature 1..49: note = Probe
  source 1..49: mol_type = other DNA

SEQ ID NO: 53711 - DNA, 50 bp, synthetic construct; identical to SEQ ID NO: 5408
  misc_feature 1..50: note = Probe
  source 1..50: mol_type = other DNA

SEQ ID NO: 53712 - DNA, 17 bp, synthetic construct
  misc_feature 1..17: note = Probe
  source 1..17: mol_type = other DNA
gaaaaagtcatggaggc

SEQ ID NO: 53713 - DNA, 18 bp, synthetic construct
  misc_feature 1..18: note = Probe
  source 1..18: mol_type = other DNA
gaaaaagtcatggaggcc

SEQ ID NO: 53714 - DNA, 19 bp, synthetic construct
  misc_feature 1..19: note = Probe
  source 1..19: mol_type = other DNA
gaaaaagtcatggaggcca

SEQ ID NO: 53715 - DNA, 21 bp, synthetic construct
  misc_feature 1..21: note = Probe
  source 1..21: mol_type = other DNA
gaaaaagtcatggaggccatg

SEQ ID NO: 53716 - DNA, 24 bp, synthetic construct
  misc_feature 1..24: note = Probe
  source 1..24: mol_type = other DNA
gaaaaagtcatggaggccatgggg

SEQ ID NO: 53717 - DNA, 25 bp, synthetic construct
  misc_feature 1..25: note = Probe
  source 1..25: mol_type = other DNA
gaaaaagtcatggaggccatggggt

SEQ ID NO: 53718 - DNA, 26 bp, synthetic construct
  misc_feature 1..26: note = Probe
  source 1..26: mol_type = other DNA
gaaaaagtcatggaggccatggggtt

SEQ ID NO: 53719 - DNA, 27 bp, synthetic construct
  misc_feature 1..27: note = Probe
  source 1..27: mol_type = other DNA
gaaaaagtcatggaggccatggggttg

SEQ ID NO: 53720 - DNA, 28 bp, synthetic construct
  misc_feature 1..28: note = Probe
  source 1..28: mol_type = other DNA
gaaaaagtcatggaggccatggggttgg

SEQ ID NO: 53721 - DNA, 29 bp, synthetic construct
  misc_feature 1..29: note = Probe
  source 1..29: mol_type = other DNA
gaaaaagtcatggaggccatggggttggc

SEQ ID NO: 53722 - DNA, 30 bp, synthetic construct; identical to SEQ ID NO: 10057
  misc_feature 1..30: note = Probe
  source 1..30: mol_type = other DNA

SEQ ID NO: 53723 - DNA, 31 bp, synthetic construct; identical to SEQ ID NO: 5416
  misc_feature 1..31: note = Probe
  source 1..31: mol_type = other DNA

SEQ ID NO: 53724 - DNA, 32 bp, synthetic construct; identical to SEQ ID NO: 5417
  misc_feature 1..32: note = Probe
  source 1..32: mol_type = other DNA

SEQ ID NO: 53725 - DNA, 50 bp, synthetic construct; identical to SEQ ID NO: 5419
  misc_feature 1..50: note = Probe
  source 1..50: mol_type = other DNA

SEQ ID NO: 53726 - DNA, 24 bp, synthetic construct
  misc_feature 1..24: note = Probe
  source 1..24: mol_type = other DNA
gaaaacctttttccaaggacaaat

SEQ ID NO: 53727 - DNA, 31 bp, synthetic construct; identical to SEQ ID NO: 862
  misc_feature 1..31: note = Probe
  source 1..31: mol_type = other DNA

SEQ ID NO: 53728 - DNA, 33 bp, synthetic construct; identical to SEQ ID NO: 864
  misc_feature 1..33: note = Probe
  source 1..33: mol_type = other DNA

SEQ ID NO: 53729 - DNA, 40 bp, synthetic construct; identical to SEQ ID NO: 5427
  misc_feature 1..40: note = Probe
  source 1..40: mol_type = other DNA

SEQ ID NO: 53730 - DNA, 41 bp, synthetic construct; identical to SEQ ID NO: 5428
  misc_feature 1..41: note = Probe
  source 1..41: mol_type = other DNA

SEQ ID NO: 53731 - DNA, 42 bp, synthetic construct; identical to SEQ ID NO: 5429
  misc_feature 1..42: note = Probe
  source 1..42: mol_type = other DNA

SEQ ID NO: 53732 - DNA, 21 bp, synthetic construct
  misc_feature 1..21: note = Probe
  source 1..21: mol_type = other DNA
gaaagcatgctccagtggcgc

SEQ ID NO: 53733 - DNA, 50 bp, synthetic construct; identical to SEQ ID NO: 5440
  misc_feature 1..50: note = Probe
  source 1..50: mol_type = other DNA

SEQ ID NO: 53734 - DNA, 26 bp, synthetic construct
  misc_feature 1..26: note = Probe
  source 1..26: mol_type = other DNA
gaaccaacacctctttacagtgaaat

SEQ ID NO: 53735 - DNA, 16 bp, synthetic construct
  misc_feature 1..16: note = Probe
  source 1..16: mol_type = other DNA
gaactgctaactcatg

SEQ ID NO: 53736 - DNA, 39 bp, synthetic construct; identical to SEQ ID NO: 5463
  misc_feature 1..39: note = Probe
  source 1..39: mol_type = other DNA

SEQ ID NO: 53737 - DNA, 40 bp, synthetic construct; identical to SEQ ID NO: 5464
  misc_feature 1..40: note = Probe
  source 1..40: mol_type = other DNA

SEQ ID NO: 53738 - DNA, 41 bp, synthetic construct; identical to SEQ ID NO: 5465
  misc_feature 1..41: note = Probe
  source 1..41: mol_type = other DNA

SEQ ID NO: 53739 - DNA, 42 bp, synthetic construct; identical to SEQ ID NO: 5466
  misc_feature 1..42: note = Probe
  source 1..42: mol_type = other DNA

SEQ ID NO: 53740 - DNA, 43 bp, synthetic construct; identical to SEQ ID NO: 5467
  misc_feature 1..43: note = Probe
  source 1..43: mol_type = other DNA

SEQ ID NO: 53741 - DNA, 44 bp, synthetic construct; identical to SEQ ID NO: 5468
  misc_feature 1..44: note = Probe
  source 1..44: mol_type = other DNA

SEQ ID NO: 53742 - DNA, 45 bp, synthetic construct; identical to SEQ ID NO: 5469
  misc_feature 1..45: note = Probe
  source 1..45: mol_type = other DNA

SEQ ID NO: 53743 - DNA, 46 bp, synthetic construct; identical to SEQ ID NO: 5470
  misc_feature 1..46: note = Probe
  source 1..46: mol_type = other DNA

SEQ ID NO: 53744 - DNA, 50 bp, synthetic construct; identical to SEQ ID NO: 5472
  misc_feature 1..50: note = Probe
  source 1..50: mol_type = other DNA

SEQ ID NO: 53745 - DNA, 27 bp, synthetic construct
  misc_feature 1..27: note = Probe
  source 1..27: mol_type = other DNA
gaagaagcagcttcaaacctgccgggg

SEQ ID NO: 53746 - DNA, 29 bp, synthetic construct
  misc_feature 1..29: note = Probe
  source 1..29: mol_type = other DNA
gaagaagcagcttcaaacctgccggggct

SEQ ID NO: 53747 - DNA, 31 bp, synthetic construct; identical to SEQ ID NO: 5479
  misc_feature 1..31: note = Probe
  source 1..31: mol_type = other DNA

SEQ ID NO: 53748 - DNA, 33 bp, synthetic construct; identical to SEQ ID NO: 5481
  misc_feature 1..33: note = Probe
  source 1..33: mol_type = other DNA

SEQ ID NO: 53749 - DNA, 30 bp, synthetic construct; identical to SEQ ID NO: 5497
  misc_feature 1..30: note = Probe
  source 1..30: mol_type = other DNA

SEQ ID NO: 53750 - DNA, 19 bp, synthetic construct
  misc_feature 1..19: note = Probe
  source 1..19: mol_type = other DNA
gaagcgggtgctcttattt

SEQ ID NO: 53751 - DNA, 20 bp, synthetic construct
  misc_feature 1..20: note = Probe
  source 1..20: mol_type = other DNA
gaagcgggtgctcttatttt

SEQ ID NO: 53752 - DNA, 18 bp, synthetic construct
  misc_feature 1..18: note = Probe
  source 1..18: mol_type = other DNA
gaatccagcgatccgagt

SEQ ID NO: 53753 - DNA, 19 bp, synthetic construct
  misc_feature 1..19: note = Probe
  source 1..19: mol_type = other DNA
gaatccagcgatccgagtt

SEQ ID NO: 53754 - DNA, 39 bp, synthetic construct; identical to SEQ ID NO: 5522
  misc_feature 1..39: note = Probe
  source 1..39: mol_type = other DNA

SEQ ID NO: 53755 - DNA, 40 bp, synthetic construct; identical to SEQ ID NO: 5523
  misc_feature 1..40: note = Probe
  source 1..40: mol_type = other DNA

SEQ ID NO: 53756 - DNA, 39 bp, synthetic construct
  misc_feature 1..39: note = Probe
  source 1..39: mol_type = other DNA
gaatccagcgatccgagttcaaatctcggtggaacctgt

SEQ ID NO: 53757 - DNA, 39 bp, synthetic construct
  misc_feature 1..39: note = Probe
  source 1..39: mol_type = other DNA
gaatccagcgatccgagttcaaatctcggtggaaccttt

SEQ ID NO: 53758 - DNA, 39 bp, synthetic construct; identical to SEQ ID NO: 5525
  misc_feature 1..39: note = Probe
  source 1..39: mol_type = other DNA

SEQ ID NO: 53759 - DNA, 40 bp, synthetic construct; identical to SEQ ID NO: 5526
  misc_feature 1..40: note = Probe
  source 1..40: mol_type = other DNA

SEQ ID NO: 53760 - DNA, 29 bp, synthetic construct
  misc_feature 1..29: note = Probe
  source 1..29: mol_type = other DNA
gaatctgacaacagaggcttacgacccct

SEQ ID NO: 53761 - DNA, 31 bp, synthetic construct; identical to SEQ ID NO: 899
  misc_feature 1..31: note = Probe
  source 1..31: mol_type = other DNA

SEQ ID NO: 53762 - DNA, 33 bp, synthetic construct; identical to SEQ ID NO: 5535
  misc_feature 1..33: note = Probe
  source 1..33: mol_type = other DNA

SEQ ID NO: 53763 - DNA, 37 bp, synthetic construct; identical to SEQ ID NO: 901
  misc_feature 1..37: note = Probe
  source 1..37: mol_type = other DNA

SEQ ID NO: 53764 - DNA, 38 bp, synthetic construct; identical to SEQ ID NO: 5537
  misc_feature 1..38: note = Probe
  source 1..38: mol_type = other DNA

SEQ ID NO: 53765 - DNA, 39 bp, synthetic construct; identical to SEQ ID NO: 5538
  misc_feature 1..39: note = Probe
  source 1..39: mol_type = other DNA

SEQ ID NO: 53766 - DNA, 40 bp, synthetic construct; identical to SEQ ID NO: 5539
  misc_feature 1..40: note = Probe
  source 1..40: mol_type = other DNA

SEQ ID NO: 53767 - DNA, 50 bp, synthetic construct; identical to SEQ ID NO: 5541
  misc_feature 1..50: note = Probe
  source 1..50: mol_type = other DNA

SEQ ID NO: 53768 - DNA, 17 bp, synthetic construct
  misc_feature 1..17: note = Probe
  source 1..17: mol_type = other DNA
gaattctcgcctgccac

SEQ ID NO: 53769 - DNA, 18 bp, synthetic construct
  misc_feature 1..18: note = Probe
  source 1..18: mol_type = other DNA
gaattctcgcctgccacg

SEQ ID NO: 53770 - DNA, 32 bp, synthetic construct; identical to SEQ ID NO: 19994
  misc_feature 1..32: note = Probe
  source 1..32: mol_type = other DNA

SEQ ID NO: 53771 - DNA, 45 bp, synthetic construct; identical to SEQ ID NO: 5544
  misc_feature 1..45: note = Probe
  source 1..45: mol_type = other DNA

SEQ ID NO: 53772 - DNA, 46 bp, synthetic construct; identical to SEQ ID NO: 5545
  misc_feature 1..46: note = Probe
  source 1..46: mol_type = other DNA

SEQ ID NO: 53773 - DNA, 25 bp, synthetic construct
  misc_feature 1..25: note = Probe
  source 1..25: mol_type = other DNA
gacaacagaggcttacgacccctta

SEQ ID NO: 53774 - DNA, 31 bp, synthetic construct; identical to SEQ ID NO: 903
  misc_feature 1..31: note = Probe
  source 1..31: mol_type = other DNA

SEQ ID NO: 53775 - DNA, 32 bp, synthetic construct; identical to SEQ ID NO: 5551
  misc_feature 1..32: note = Probe
  source 1..32: mol_type = other DNA

SEQ ID NO: 53776 - DNA, 33 bp, synthetic construct; identical to SEQ ID NO: 5552
  misc_feature 1..33: note = Probe
  source 1..33: mol_type = other DNA

SEQ ID NO: 53777 - DNA, 34 bp, synthetic construct; identical to SEQ ID NO: 5553
  misc_feature 1..34: note = Probe
  source 1..34: mol_type = other DNA

SEQ ID NO: 53778 - DNA, 29 bp, synthetic construct
  misc_feature 1..29: note = Probe
  source 1..29: mol_type = other DNA
gacaggggttaggcctctttttaccagct

SEQ ID NO: 53779 - DNA, 21 bp, synthetic construct
  misc_feature 1..21: note = Probe
  source 1..21: mol_type = other DNA
gacccagtggcctaatggata

SEQ ID NO: 53780 - DNA, 27 bp, synthetic construct
  misc_feature 1..27: note = Probe
  source 1..27: mol_type = other DNA
gacccagtggcctaatggataaggcat

SEQ ID NO: 53781 - DNA, 28 bp, synthetic construct
  misc_feature 1..28: note = Probe
  source 1..28: mol_type = other DNA
gacccagtggcctaatggataaggcatc

SEQ ID NO: 53782 - DNA, 29 bp, synthetic construct
  misc_feature 1..29: note = Probe
  source 1..29: mol_type = other DNA
gacccagtggcctaatggataaggcatca

SEQ ID NO: 53783 - DNA, 31 bp, synthetic construct; identical to SEQ ID NO: 904
  misc_feature 1..31: note = Probe
  source 1..31: mol_type = other DNA

SEQ ID NO: 53784 - DNA, 32 bp, synthetic construct; identical to SEQ ID NO: 905
  misc_feature 1..32: note = Probe
  source 1..32: mol_type = other DNA

SEQ ID NO: 53785 - DNA, 33 bp, synthetic construct; identical to SEQ ID NO: 906
  misc_feature 1..33: note = Probe
  source 1..33: mol_type = other DNA

SEQ ID NO: 53786 - DNA, 34 bp, synthetic construct; identical to SEQ ID NO: 907
  misc_feature 1..34: note = Probe
  source 1..34: mol_type = other DNA

SEQ ID NO: 53787 - DNA, 36 bp, synthetic construct; identical to SEQ ID NO: 909
  misc_feature 1..36: note = Probe
  source 1..36: mol_type = other DNA

SEQ ID NO: 53788 - DNA, 37 bp, synthetic construct; identical to SEQ ID NO: 47856
  misc_feature 1..37: note = Probe
  source 1..37: mol_type = other DNA

SEQ ID NO: 53789 - DNA, 31 bp, synthetic construct; identical to SEQ ID NO: 5567
  misc_feature 1..31: note = Probe
  source 1..31: mol_type = other DNA

SEQ ID NO: 53790 - DNA, 31 bp, synthetic construct; identical to SEQ ID NO: 5568
  misc_feature 1..31: note = Probe
  source 1..31: mol_type = other DNA

SEQ ID NO: 53791 - DNA, 31 bp, synthetic construct; identical to SEQ ID NO: 5580
  misc_feature 1..31: note = Probe
  source 1..31: mol_type = other DNA

SEQ ID NO: 53792 - DNA, 30 bp, synthetic construct; identical to SEQ ID NO: 47878
  misc_feature 1..30: note = Probe
  source 1..30: mol_type = other DNA

SEQ ID NO: 53793 - DNA, 20 bp, synthetic construct
  misc_feature 1..20: note = Probe
  source 1..20: mol_type = other DNA
gacctcgtggcgcaatggta

SEQ ID NO: 53794 - DNA, 21 bp, synthetic construct
  misc_feature 1..21: note = Probe
  source 1..21: mol_type = other DNA
gacctcgtggcgcaatggtag

SEQ ID NO: 53795 - DNA, 22 bp, synthetic construct
  misc_feature 1..22: note = Probe
  source 1..22: mol_type = other DNA
gacctcgtggcgcaatggtagc

SEQ ID NO: 53796 - DNA, 23 bp, synthetic construct
  misc_feature 1..23: note = Probe
  source 1..23: mol_type = other DNA
gacctcgtggcgcaatggtagcg

SEQ ID NO: 53797 - DNA, 30 bp, synthetic construct; identical to SEQ ID NO: 42992
  misc_feature 1..30: note = Probe
  source 1..30: mol_type = other DNA

SEQ ID NO: 53798 - DNA, 34 bp, synthetic construct; identical to SEQ ID NO: 20086
  misc_feature 1..34: note = Probe
  source 1..34: mol_type = other DNA

SEQ ID NO: 53799 - DNA, 16 bp, synthetic construct
  misc_feature 1..16: note = Probe
  source 1..16: mol_type = other DNA
gacgaggtggccgagt

SEQ ID NO: 53800 - DNA, 18 bp, synthetic construct
  misc_feature 1..18: note = Probe
  source 1..18: mol_type = other DNA
gacgaggtggccgagtgg

SEQ ID NO: 53801 - DNA, 29 bp, synthetic construct
  misc_feature 1..29: note = Probe
  source 1..29: mol_type = other DNA
gacgggctcacatcaccccataaacaaat

SEQ ID NO: 53802 - DNA, 25 bp, synthetic construct
  misc_feature 1..25: note = Probe
  source 1..25: mol_type = other DNA
gactacaaaaaggattagactgaac

SEQ ID NO: 53803 - DNA, 26 bp, synthetic construct
  misc_feature 1..26: note = Probe
  source 1..26: mol_type = other DNA
gactacaaaaaggattagactgaacc

SEQ ID NO: 53804 - DNA, 25 bp, synthetic construct
  misc_feature 1..25: note = Probe
  source 1..25: mol_type = other DNA
gactacggatcagaagattccaggt

SEQ ID NO: 53805 - DNA, 26 bp, synthetic construct
  misc_feature 1..26: note = Probe
  source 1..26: mol_type = other DNA
gactacggatcagaagattccaggtt

SEQ ID NO: 53806 - DNA, 25 bp, synthetic construct
  misc_feature 1..25: note = Probe
  source 1..25: mol_type = other DNA
gactacggatcagaagattctaggt

SEQ ID NO: 53807 - DNA, 26 bp, synthetic construct
  misc_feature 1..26: note = Probe
  source 1..26: mol_type = other DNA
gactacggatcagaagattctaggtt

SEQ ID NO: 53808 - DNA, 36 bp, synthetic construct; identical to SEQ ID NO: 5607
  misc_feature 1..36: note = Probe
  source 1..36: mol_type = other DNA

SEQ ID NO: 53809 - DNA, 22 bp, synthetic construct
  misc_feature 1..22: note = Probe
  source 1..22: mol_type = other DNA
gactctgaatccagcgatccga

SEQ ID NO: 53810 - DNA, 23 bp, synthetic construct
  misc_feature 1..23: note = Probe
  source 1..23: mol_type = other DNA
gactctgaatccagcgatccgag

SEQ ID NO: 53811 - DNA, 44 bp, synthetic construct; identical to SEQ ID NO: 5610
  misc_feature 1..44: note = Probe
  source 1..44: mol_type = other DNA

SEQ ID NO: 53812 - DNA, 16 bp, synthetic construct
  misc_feature 1..16: note = Probe
  source 1..16: mol_type = other DNA
gagaaagctcacaaga

SEQ ID NO: 53813 - DNA, 17 bp, synthetic construct
  misc_feature 1..17: note = Probe
  source 1..17: mol_type = other DNA
gagaaagctcacaagaa

SEQ ID NO: 53814 - DNA, 18 bp, synthetic construct
  misc_feature 1..18: note = Probe
  source 1..18: mol_type = other DNA
gagaaagctcacaagaac

SEQ ID NO: 53815 - DNA, 21 bp, synthetic construct
  misc_feature 1..21: note = Probe
  source 1..21: mol_type = other DNA
gagaaagctcacaagaactgc

SEQ ID NO: 53816 - DNA, 24 bp, synthetic construct
  misc_feature 1..24: note = Probe
  source 1..24: mol_type = other DNA
gagaaagctcacaagaactgctaa

SEQ ID NO: 53817 - DNA, 27 bp, synthetic construct
  misc_feature 1..27: note = Probe
  source 1..27: mol_type = other DNA
gagaaagctcacaagaactgctaactc

SEQ ID NO: 53818 - DNA, 28 bp, synthetic construct
  misc_feature 1..28: note = Probe
  source 1..28: mol_type = other DNA
gagaaagctcacaagaactgctaactca

SEQ ID NO: 53819 - DNA, 29 bp, synthetic construct
  misc_feature 1..29: note = Probe
  source 1..29: mol_type = other DNA
gagaaagctcacaagaactgctaactcat

SEQ ID NO: 53820 - DNA, 31 bp, synthetic construct; identical to SEQ ID NO: 933
  misc_feature 1..31: note = Probe
  source 1..31: mol_type = other DNA

SEQ ID NO: 53821 - DNA, 33 bp, synthetic construct; identical to SEQ ID NO: 935
  misc_feature 1..33: note = Probe
  source 1..33: mol_type = other DNA

SEQ ID NO: 53822 - DNA, 34 bp, synthetic construct; identical to SEQ ID NO: 936
  misc_feature 1..34: note = Probe
  source 1..34: mol_type = other DNA

SEQ ID NO: 53823 - DNA, 35 bp, synthetic construct; identical to SEQ ID NO: 937
  misc_feature 1..35: note = Probe
  source 1..35: mol_type = other DNA

SEQ ID NO: 53824 - DNA, 37 bp, synthetic construct; identical to SEQ ID NO: 939
  misc_feature 1..37: note = Probe
  source 1..37: mol_type = other DNA

SEQ ID NO: 53825 - DNA, 39 bp, synthetic construct; identical to SEQ ID NO: 941
  misc_feature 1..39: note = Probe
  source 1..39: mol_type = other DNA

SEQ ID NO: 53826 - DNA, 43 bp, synthetic construct; identical to SEQ ID NO: 945
  misc_feature 1..43: note = Probe
  source 1..43: mol_type = other DNA

SEQ ID NO: 53827 - DNA, 44 bp, synthetic construct; identical to SEQ ID NO: 946
  misc_feature 1..44: note = Probe
  source 1..44: mol_type = other DNA

SEQ ID NO: 53828 - DNA, 46 bp, synthetic construct; identical to SEQ ID NO: 948
  misc_feature 1..46: note = Probe
  source 1..46: mol_type = other DNA

SEQ ID NO: 53829 - DNA, 28 bp, synthetic construct
  misc_feature 1..28: note = Probe
  source 1..28: mol_type = other DNA
gagaaccaacacctctttacagtgaaat

SEQ ID NO: 53830 - DNA, 24 bp, synthetic construct
  misc_feature 1..24: note = Probe
  source 1..24: mol_type = other DNA
gagaccggggttcgattccccgac

SEQ ID NO: 53831 - DNA, 33 bp, synthetic construct; identical to SEQ ID NO: 5626
  misc_feature 1..33: note = Probe
  source 1..33: mol_type = other DNA

SEQ ID NO: 53832 - DNA, 29 bp, synthetic construct
  misc_feature 1..29: note = Probe
  source 1..29: mol_type = other DNA
gagatgaaaacctttttccaaggacaaat

SEQ ID NO: 53833 - DNA, 32 bp, synthetic construct; identical to SEQ ID NO: 5643
  misc_feature 1..32: note = Probe
  source 1..32: mol_type = other DNA

SEQ ID NO: 53834 - DNA, 30 bp, synthetic construct; identical to SEQ ID NO: 13398
  misc_feature 1..30: note = Probe
  source 1..30: mol_type = other DNA

SEQ ID NO: 53835 - DNA, 31 bp, synthetic construct; identical to SEQ ID NO: 5648
  misc_feature 1..31: note = Probe
  source 1..31: mol_type = other DNA

SEQ ID NO: 53836 - DNA, 28 bp, synthetic construct
  misc_feature 1..28: note = Probe
  source 1..28: mol_type = other DNA
gagcatgggactcttaatcccagggtcg

SEQ ID NO: 53837 - DNA, 29 bp, synthetic construct
  misc_feature 1..29: note = Probe
  source 1..29: mol_type = other DNA
gagcatgggactcttaatcccagggtcgt

SEQ ID NO: 53838 - DNA, 16 bp, synthetic construct
  misc_feature 1..16: note = Probe
  source 1..16: mol_type = other DNA
gagcccggtaatcgca

SEQ ID NO: 53839 - DNA, 23 bp, synthetic construct
  misc_feature 1..23: note = Probe
  source 1..23: mol_type = other DNA
gagcccggtaatcgcataaaact

SEQ ID NO: 53840 - DNA, 24 bp, synthetic construct
  misc_feature 1..24: note = Probe
  source 1..24: mol_type = other DNA
gagcccggtaatcgcataaaactt

SEQ ID NO: 53841 - DNA, 26 bp, synthetic construct
  misc_feature 1..26: note = Probe
  source 1..26: mol_type = other DNA
gagcccggtaatcgcataaaacttaa

SEQ ID NO: 53842 - DNA, 27 bp, synthetic construct
  misc_feature 1..27: note = Probe
  source 1..27: mol_type = other DNA
gagcccggtaatcgcataaaacttaaa

SEQ ID NO: 53843 - DNA, 28 bp, synthetic construct
  misc_feature 1..28: note = Probe
  source 1..28: mol_type = other DNA
gagcccggtaatcgcataaaacttaaaa

SEQ ID NO: 53844 - DNA, 29 bp, synthetic construct
  misc_feature 1..29: note = Probe
  source 1..29: mol_type = other DNA
gagcccggtaatcgcataaaacttaaaac

SEQ ID NO: 53845 - DNA, 32 bp, synthetic construct; identical to SEQ ID NO: 5657
  misc_feature 1..32: note = Probe
  source 1..32: mol_type = other DNA

SEQ ID NO: 53846 - DNA, 33 bp, synthetic construct; identical to SEQ ID NO: 5658
  misc_feature 1..33: note = Probe
  source 1..33: mol_type = other DNA

SEQ ID NO: 53847 - DNA, 38 bp, synthetic construct; identical to SEQ ID NO: 962
  misc_feature 1..38: note = Probe
  source 1..38: mol_type = other DNA

SEQ ID NO: 53848 - DNA, 41 bp, synthetic construct; identical to SEQ ID NO: 20258
  misc_feature 1..41: note = Probe
  source 1..41: mol_type = other DNA

SEQ ID NO: 53849 - DNA, 42 bp, synthetic construct; identical to SEQ ID NO: 13408
  misc_feature 1..42: note = Probe
  source 1..42: mol_type = other DNA

SEQ ID NO: 53850 - DNA, 43 bp, synthetic construct; identical to SEQ ID NO: 20259
  misc_feature 1..43: note = Probe
  source 1..43: mol_type = other DNA

SEQ ID NO: 53851 - DNA, 44 bp, synthetic construct; identical to SEQ ID NO: 5660
  misc_feature 1..44: note = Probe
  source 1..44: mol_type = other DNA

SEQ ID NO: 53852 - DNA, 46 bp, synthetic construct; identical to SEQ ID NO: 5661
  misc_feature 1..46: note = Probe
  source 1..46: mol_type = other DNA

SEQ ID NO: 53853 - DNA, 49 bp, synthetic construct; identical to SEQ ID NO: 5662
  misc_feature 1..49: note = Probe
  source 1..49: mol_type = other DNA

SEQ ID NO: 53854 - DNA, 30 bp, synthetic construct; identical to SEQ ID NO: 969
  misc_feature 1..30: note = Probe
  source 1..30: mol_type = other DNA

SEQ ID NO: 53855 - DNA, 38 bp, synthetic construct; identical to SEQ ID NO: 5681
  misc_feature 1..38: note = Probe
  source 1..38: mol_type = other DNA

SEQ ID NO: 53856 - DNA, 39 bp, synthetic construct; identical to SEQ ID NO: 5682
  misc_feature 1..39: note = Probe
  source 1..39: mol_type = other DNA

SEQ ID NO: 53857 - DNA, 29 bp, synthetic construct
  misc_feature 1..29: note = Probe
  source 1..29: mol_type = other DNA
gagtatccccgcctgtcacgcgggagacc

SEQ ID NO: 53858 - DNA, 30 bp, synthetic construct; identical to SEQ ID NO: 20339
  misc_feature 1..30: note = Probe
  source 1..30: mol_type = other DNA

SEQ ID NO: 53859 - DNA, 31 bp, synthetic construct; identical to SEQ ID NO: 13422
  misc_feature 1..31: note = Probe
  source 1..31: mol_type = other DNA

SEQ ID NO: 53860 - DNA, 25 bp, synthetic construct
  misc_feature 1..25: note = Probe
  source 1..25: mol_type = other DNA
gagttaaagactttttctctgattt

SEQ ID NO: 53861 - DNA, 39 bp, synthetic construct; identical to SEQ ID NO: 31557
  misc_feature 1..39: note = Probe
  source 1..39: mol_type = other DNA

SEQ ID NO: 53862 - DNA, 48 bp, synthetic construct
  misc_feature 1..48: note = Probe
  source 1..48: mol_type = other DNA
gataaaagagttactttgatagagtaaataataggagcttaaaccccc

SEQ ID NO: 53863 - DNA, 49 bp, synthetic construct
  misc_feature 1..49: note = Probe
  source 1..49: mol_type = other DNA
gataaaagagttactttgatagagtaaataataggagcttaaaccccct

SEQ ID NO: 53864 - DNA, 42 bp, synthetic construct; identical to SEQ ID NO: 5712
  misc_feature 1..42: note = Probe
  source 1..42: mol_type = other DNA

SEQ ID NO: 53865 - DNA, 43 bp, synthetic construct; identical to SEQ ID NO: 5713
  misc_feature 1..43: note = Probe
  source 1..43: mol_type = other DNA

SEQ ID NO: 53866 - DNA, 26 bp, synthetic construct
  misc_feature 1..26: note = Probe
  source 1..26: mol_type = other DNA
gatagctcagtcggtagagcatcaga

SEQ ID NO: 53867 - DNA, 25 bp, synthetic construct
  misc_feature 1..25: note = Probe
  source 1..25: mol_type = other DNA
gatatccaaccttcagctatagggt

SEQ ID NO: 53868 - DNA, 20 bp, synthetic construct
  misc_feature 1..20: note = Probe
  source 1..20: mol_type = other DNA
gatccccggcatctccattg

SEQ ID NO: 53869 - DNA, 26 bp, synthetic construct
  misc_feature 1..26: note = Probe
  source 1..26: mol_type = other DNA
gatgaaaacctttttccaaggacaaa

SEQ ID NO: 53870 - DNA, 27 bp, synthetic construct
  misc_feature 1..27: note = Probe
  source 1..27: mol_type = other DNA
gatgaaaacctttttccaaggacaaat

SEQ ID NO: 53871 - DNA, 26 bp, synthetic construct
  misc_feature 1..26: note = Probe
  source 1..26: mol_type = other DNA
gatgcagagtggggttttgcagtcct

SEQ ID NO: 53872 - DNA, 29 bp, synthetic construct
  misc_feature 1..29: note = Probe
  source 1..29: mol_type = other DNA
gatgcagagtggggttttgcagtccttag

SEQ ID NO: 53873 - DNA, 30 bp, synthetic construct; identical to SEQ ID NO: 5730
  misc_feature 1..30: note = Probe
  source 1..30: mol_type = other DNA

SEQ ID NO: 53874 - DNA, 31 bp, synthetic construct; identical to SEQ ID NO: 5731
  misc_feature 1..31: note = Probe
  source 1..31: mol_type = other DNA

SEQ ID NO: 53875 - DNA, 31 bp, synthetic construct; identical to SEQ ID NO: 5736
  misc_feature 1..31: note = Probe
  source 1..31: mol_type = other DNA

SEQ ID NO: 53876 - DNA, 32 bp, synthetic construct; identical to SEQ ID NO: 5737
  misc_feature 1..32: note = Probe
  source 1..32: mol_type = other DNA

SEQ ID NO: 53877 - DNA, 34 bp, synthetic construct; identical to SEQ ID NO: 5739
  misc_feature 1..34: note = Probe
  source 1..34: mol_type = other DNA

SEQ ID NO: 53878 - DNA, 19 bp, synthetic construct
  misc_feature 1..19: note = Probe
  source 1..19: mol_type = other DNA
gattcccattcttgcgacc

SEQ ID NO: 53879 - DNA, 21 bp, synthetic construct
  misc_feature 1..21: note = Probe
  source 1..21: mol_type = other DNA
gattcccattcttgcgacccg

SEQ ID NO: 53880 - DNA, 25 bp, synthetic construct
  misc_feature 1..25: note = Probe
  source 1..25: mol_type = other DNA
gattcccattcttgcgacccgggtt

SEQ ID NO: 53881 - DNA, 26 bp, synthetic construct
  misc_feature 1..26: note = Probe
  source 1..26: mol_type = other DNA
gattcggcgctctcaccgccgcggcc

SEQ ID NO: 53882 - DNA, 27 bp, synthetic construct
  misc_feature 1..27: note = Probe
  source 1..27: mol_type = other DNA
gattcggcgctttcaccgccgcggccc

SEQ ID NO: 53883 - DNA, 32 bp, synthetic construct
  misc_feature 1..32: note = Probe
  source 1..32: mol_type = other DNA
gattctaggttcgactcctggctggctcgcga

SEQ ID NO: 53884 - DNA, 28 bp, synthetic construct
  misc_feature 1..28: note = Probe
  source 1..28: mol_type = other DNA
gattctcgcttagggtgcgagaggtccc

SEQ ID NO: 53885 - DNA, 28 bp, synthetic construct
  misc_feature 1..28: note = Probe
  source 1..28: mol_type = other DNA
gattctcgcttcgggtgcgagaggtccc

SEQ ID NO: 53886 - DNA, 28 bp, synthetic construct
  misc_feature 1..28: note = Probe
  source 1..28: mol_type = other DNA
gattctcgctttgggtgcgagaggtccc

SEQ ID NO: 53887 - DNA, 28 bp, synthetic construct
  misc_feature 1..28: note = Probe
  source 1..28: mol_type = other DNA
gattctcggtttgggtccgagaggtccc

SEQ ID NO: 53888 - DNA, 35 bp, synthetic construct; identical to SEQ ID NO: 5752
  misc_feature 1..35: note = Probe
  source 1..35: mol_type = other DNA

SEQ ID NO: 53889 - DNA, 46 bp, synthetic construct; identical to SEQ ID NO: 5757
  misc_feature 1..46: note = Probe
  source 1..46: mol_type = other DNA

SEQ ID NO: 53890 - DNA, 22 bp, synthetic construct
  misc_feature 1..22: note = Probe
  source 1..22: mol_type = other DNA
gattgtgggttcgagtcccatc

SEQ ID NO: 53891 - DNA, 29 bp, synthetic construct
  misc_feature 1..29: note = Probe
  source 1..29: mol_type = other DNA
gatttcaacttaacttgaccgctctgagc

SEQ ID NO: 53892 - DNA, 30 bp, synthetic construct; identical to SEQ ID NO: 5769
  misc_feature 1..30: note = Probe
  source 1..30: mol_type = other DNA

SEQ ID NO: 53893 - DNA, 31 bp, synthetic construct; identical to SEQ ID NO: 5771
  misc_feature 1..31: note = Probe
  source 1..31: mol_type = other DNA

SEQ ID NO: 53894 - DNA, 40 bp, synthetic construct; identical to SEQ ID NO: 5782
  misc_feature 1..40: note = Probe
  source 1..40: mol_type = other DNA

SEQ ID NO: 53895 - DNA, 41 bp, synthetic construct; identical to SEQ ID NO: 5783
  misc_feature 1..41: note = Probe
  source 1..41: mol_type = other DNA

SEQ ID NO: 53896 - DNA, 20 bp, synthetic construct
  misc_feature 1..20: note = Probe
  source 1..20: mol_type = other DNA
gcaatggataacgcgtctga

SEQ ID NO: 53897 - DNA, 22 bp, synthetic construct
  misc_feature 1..22: note = Probe
  source 1..22: mol_type = other DNA
gcaatggataacgcgtctgact

SEQ ID NO: 53898 - DNA, 18 bp, synthetic construct
  misc_feature 1..18: note = Probe
  source 1..18: mol_type = other DNA
gcaatggatagcgcattg

SEQ ID NO: 53899 - DNA, 19 bp, synthetic construct
  misc_feature 1..19: note = Probe
  source 1..19: mol_type = other DNA
gcaatggatagcgcattgg

SEQ ID NO: 53900 - DNA, 20 bp, synthetic construct
  misc_feature 1..20: note = Probe
  source 1..20: mol_type = other DNA
gcaatggatagcgcattgga

SEQ ID NO: 53901 - DNA, 22 bp, synthetic construct
  misc_feature 1..22: note = Probe
  source 1..22: mol_type = other DNA
gcaatggatagcgcattggact

SEQ ID NO: 53902 - DNA, 25 bp, synthetic construct
  misc_feature 1..25: note = Probe
  source 1..25: mol_type = other DNA
gcaatggatagcgcattggacttct

SEQ ID NO: 53903 - DNA, 34 bp, synthetic construct; identical to SEQ ID NO: 20500
  misc_feature 1..34: note = Probe
  source 1..34: mol_type = other DNA

SEQ ID NO: 53904 - DNA, 23 bp, synthetic construct
  misc_feature 1..23: note = Probe
  source 1..23: mol_type = other DNA
gcacccaacttacacttaggaga

SEQ ID NO: 53905 - DNA, 42 bp, synthetic construct; identical to SEQ ID NO: 5813
  misc_feature 1..42: note = Probe
  source 1..42: mol_type = other DNA

SEQ ID NO: 53906 - DNA, 50 bp, synthetic construct; identical to SEQ ID NO: 5820
  misc_feature 1..50: note = Probe
  source 1..50: mol_type = other DNA

SEQ ID NO: 53907 - DNA, 38 bp, synthetic construct; identical to SEQ ID NO: 5821
  misc_feature 1..38: note = Probe
  source 1..38: mol_type = other DNA

SEQ ID NO: 53908 - DNA, 23 bp, synthetic construct
  misc_feature 1..23: note = Probe
  source 1..23: mol_type = other DNA
gcactctggactctgaatccagc

SEQ ID NO: 53909 - DNA, 27 bp, synthetic construct
  misc_feature 1..27: note = Probe
  source 1..27: mol_type = other DNA
gcactctggactctgaatccagcgatc

SEQ ID NO: 53910 - DNA, 30 bp, synthetic construct; identical to SEQ ID NO: 990
  misc_feature 1..30: note = Probe
  source 1..30: mol_type = other DNA

SEQ ID NO: 53911 - DNA, 32 bp, synthetic construct; identical to SEQ ID NO: 20552
  misc_feature 1..32: note = Probe
  source 1..32: mol_type = other DNA

SEQ ID NO: 53912 - DNA, 33 bp, synthetic construct; identical to SEQ ID NO: 25394
  misc_feature 1..33: note = Probe
  source 1..33: mol_type = other DNA

SEQ ID NO: 53913 - DNA, 29 bp, synthetic construct
  misc_feature 1..29: note = Probe
  source 1..29: mol_type = other DNA
gcactctggactttgaatccagcgatccg

SEQ ID NO: 53914 - DNA, 30 bp, synthetic construct; identical to SEQ ID NO: 20554
  misc_feature 1..30: note = Probe
  source 1..30: mol_type = other DNA

SEQ ID NO: 53915 - DNA, 32 bp, synthetic construct; identical to SEQ ID NO: 20556
  misc_feature 1..32: note = Probe
  source 1..32: mol_type = other DNA

SEQ ID NO: 53916 - DNA, 33 bp, synthetic construct; identical to SEQ ID NO: 20557
  misc_feature 1..33: note = Probe
  source 1..33: mol_type = other DNA

SEQ ID NO: 53917 - DNA, 28 bp, synthetic construct
  misc_feature 1..28: note = Probe
  source 1..28: mol_type = other DNA
gcagagtggggttttgcagtccttagct

SEQ ID NO: 53918 - DNA, 18 bp, synthetic construct
  misc_feature 1..18: note = Probe
  source 1..18: mol_type = other DNA
gcagcgatggccgagtgg

SEQ ID NO: 53919 - DNA, 44 bp, synthetic construct; identical to SEQ ID NO: 999
  misc_feature 1..44: note = Probe
  source 1..44: mol_type = other DNA

SEQ ID NO: 53920 - DNA, 45 bp, synthetic construct; identical to SEQ ID NO: 5849
  misc_feature 1..45: note = Probe
  source 1..45: mol_type = other DNA

SEQ ID NO: 53921 - DNA, 46 bp, synthetic construct; identical to SEQ ID NO: 5850
  misc_feature 1..46: note = Probe
  source 1..46: mol_type = other DNA

SEQ ID NO: 53922 - DNA, 50 bp, synthetic construct; identical to SEQ ID NO: 5851
  misc_feature 1..50: note = Probe
  source 1..50: mol_type = other DNA

SEQ ID NO: 53923 - DNA, 29 bp, synthetic construct
  misc_feature 1..29: note = Probe
  source 1..29: mol_type = other DNA
gcatagctgccttccaagcagttgacccg

SEQ ID NO: 53924 - DNA, 38 bp, synthetic construct; identical to SEQ ID NO: 5861
  misc_feature 1..38: note = Probe
  source 1..38: mol_type = other DNA

SEQ ID NO: 53925 - DNA, 18 bp, synthetic construct
  misc_feature 1..18: note = Probe
  source 1..18: mol_type = other DNA
gcatgggtggttcagtgg

SEQ ID NO: 53926 - DNA, 20 bp, synthetic construct
  misc_feature 1..20: note = Probe
  source 1..20: mol_type = other DNA
gcatgggtggttcagtggta

SEQ ID NO: 53927 - DNA, 21 bp, synthetic construct
  misc_feature 1..21: note = Probe
  source 1..21: mol_type = other DNA
gcatgggtggttcagtggtag

SEQ ID NO: 53928 - DNA, 22 bp, synthetic construct
  misc_feature 1..22: note = Probe
  source 1..22: mol_type = other DNA
gcatgggtggttcagtggtaga

SEQ ID NO: 53929 - DNA, 23 bp, synthetic construct
  misc_feature 1..23: note = Probe
  source 1..23: mol_type = other DNA
gcatgggtggttcagtggtagaa

SEQ ID NO: 53930 - DNA, 24 bp, synthetic construct
  misc_feature 1..24: note = Probe
  source 1..24: mol_type = other DNA
gcatgggtggttcagtggtagaat

SEQ ID NO: 53931 - DNA, 25 bp, synthetic construct
  misc_feature 1..25: note = Probe
  source 1..25: mol_type = other DNA
gcatgggtggttcagtggtagaatt

SEQ ID NO: 53932 - DNA, 26 bp, synthetic construct
  misc_feature 1..26: note = Probe
  source 1..26: mol_type = other DNA
gcatgggtggttcagtggtagaattc

SEQ ID NO: 53933 - DNA, 27 bp, synthetic construct
  misc_feature 1..27: note = Probe
  source 1..27: mol_type = other DNA
gcatgggtggttcagtggtagaattct

SEQ ID NO: 53934 - DNA, 29 bp, synthetic construct
  misc_feature 1..29: note = Probe
  source 1..29: mol_type = other DNA
gcatgggtggttcagtggtagaattctcg

SEQ ID NO: 53935 - DNA, 30 bp, synthetic construct; identical to SEQ ID NO: 1002
  misc_feature 1..30: note = Probe
  source 1..30: mol_type = other DNA

SEQ ID NO: 53936 - DNA, 31 bp, synthetic construct; identical to SEQ ID NO: 1003
  misc_feature 1..31: note = Probe
  source 1..31: mol_type = other DNA

SEQ ID NO: 53937 - DNA, 35 bp, synthetic construct; identical to SEQ ID NO: 1007
  misc_feature 1..35: note = Probe
  source 1..35: mol_type = other DNA

SEQ ID NO: 53938 - DNA, 36 bp, synthetic construct; identical to SEQ ID NO: 1008
  misc_feature 1..36: note = Probe
  source 1..36: mol_type = other DNA

SEQ ID NO: 53939 - DNA, 37 bp, synthetic construct; identical to SEQ ID NO: 5870
  misc_feature 1..37: note = Probe
  source 1..37: mol_type = other DNA

SEQ ID NO: 53940 - DNA, 39 bp, synthetic construct; identical to SEQ ID NO: 5871
  misc_feature 1..39: note = Probe
  source 1..39: mol_type = other DNA

SEQ ID NO: 53941 - DNA, 46 bp, synthetic construct; identical to SEQ ID NO: 20654
  misc_feature 1..46: note = Probe
  source 1..46: mol_type = other DNA

SEQ ID NO: 53942 - DNA, 47 bp, synthetic construct; identical to SEQ ID NO: 5874
  misc_feature 1..47: note = Probe
  source 1..47: mol_type = other DNA

SEQ ID NO: 53943 - DNA, 48 bp, synthetic construct; identical to SEQ ID NO: 5875
  misc_feature 1..48: note = Probe
  source 1..48: mol_type = other DNA

SEQ ID NO: 53944 - DNA, 33 bp, synthetic construct; identical to SEQ ID NO: 5879
  misc_feature 1..33: note = Probe
  source 1..33: mol_type = other DNA

SEQ ID NO: 53945 - DNA, 35 bp, synthetic construct; identical to SEQ ID NO: 13475
  misc_feature 1..35: note = Probe
  source 1..35: mol_type = other DNA

SEQ ID NO: 53946 - DNA, 50 bp, synthetic construct; identical to SEQ ID NO: 1012
  misc_feature 1..50: note = Probe
  source 1..50: mol_type = other DNA

SEQ ID NO: 53947 - DNA, 16 bp, synthetic construct
  misc_feature 1..16: note = Probe
  source 1..16: mol_type = other DNA
gcattggtggttcagt

SEQ ID NO: 53948 - DNA, 18 bp, synthetic construct
  misc_feature 1..18: note = Probe
  source 1..18: mol_type = other DNA
gcattggtggttcagtgg

SEQ ID NO: 53949 - DNA, 19 bp, synthetic construct
  misc_feature 1..19: note = Probe
  source 1..19: mol_type = other DNA
gcattggtggttcagtggt

SEQ ID NO: 53950 - DNA, 20 bp, synthetic construct
  misc_feature 1..20: note = Probe
  source 1..20: mol_type = other DNA
gcattggtggttcagtggta

SEQ ID NO: 53951 - DNA, 21 bp, synthetic construct
  misc_feature 1..21: note = Probe
  source 1..21: mol_type = other DNA
gcattggtggttcagtggtag

SEQ ID NO: 53952 - DNA, 22 bp, synthetic construct
  misc_feature 1..22: note = Probe
  source 1..22: mol_type = other DNA
gcattggtggttcagtggtaga

SEQ ID NO: 53953 - DNA, 23 bp, synthetic construct
  misc_feature 1..23: note = Probe
  source 1..23: mol_type = other DNA
gcattggtggttcagtggtagaa

SEQ ID NO: 53954 - DNA, 24 bp, synthetic construct
  misc_feature 1..24: note = Probe
  source 1..24: mol_type = other DNA
gcattggtggttcagtggtagaat

SEQ ID NO: 53955 - DNA, 25 bp, synthetic construct
  misc_feature 1..25: note = Probe
  source 1..25: mol_type = other DNA
gcattggtggttcagtggtagaatt

SEQ ID NO: 53956 - DNA, 26 bp, synthetic construct
  misc_feature 1..26: note = Probe
  source 1..26: mol_type = other DNA
gcattggtggttcagtggtagaattc

SEQ ID NO: 53957 - DNA, 27 bp, synthetic construct
  misc_feature 1..27: note = Probe
  source 1..27: mol_type = other DNA
gcattggtggttcagtggtagaattct

SEQ ID NO: 53958 - DNA, 28 bp, synthetic construct
  misc_feature 1..28: note = Probe
  source 1..28: mol_type = other DNA
gcattggtggttcagtggtagaattctc

SEQ ID NO: 53959 - DNA, 29 bp, synthetic construct
  misc_feature 1..29: note = Probe
  source 1..29: mol_type = other DNA
gcattggtggttcagtggtagaattctcg

SEQ ID NO: 53960 - DNA, 30 bp, synthetic construct; identical to SEQ ID NO: 5900
  misc_feature 1..30: note = Probe
  source 1..30: mol_type = other DNA

SEQ ID NO: 53961 - DNA, 31 bp, synthetic construct; identical to SEQ ID NO: 5901
  misc_feature 1..31: note = Probe
  source 1..31: mol_type = other DNA

SEQ ID NO: 53962 - DNA, 32 bp, synthetic construct; identical to SEQ ID NO: 5902
  misc_feature 1..32: note = Probe
  source 1..32: mol_type = other DNA

SEQ ID NO: 53963 - DNA, 33 bp, synthetic construct; identical to SEQ ID NO: 5903
  misc_feature 1..33: note = Probe
  source 1..33: mol_type = other DNA

SEQ ID NO: 53964 - DNA, 34 bp, synthetic construct; identical to SEQ ID NO: 5904
  misc_feature 1..34: note = Probe
  source 1..34: mol_type = other DNA

SEQ ID NO: 53965 - DNA, 35 bp, synthetic construct; identical to SEQ ID NO: 5905
  misc_feature 1..35: note = Probe
  source 1..35: mol_type = other DNA

SEQ ID NO: 53966 - DNA, 36 bp, synthetic construct; identical to SEQ ID NO: 5906
  misc_feature 1..36: note = Probe
  source 1..36: mol_type = other DNA

SEQ ID NO: 53967 - DNA, 37 bp, synthetic construct; identical to SEQ ID NO: 40250
  misc_feature 1..37: note = Probe
  source 1..37: mol_type = other DNA

SEQ ID NO: 53968 - DNA, 33 bp, synthetic construct; identical to SEQ ID NO: 5908
  misc_feature 1..33: note = Probe
  source 1..33: mol_type = other DNA

SEQ ID NO: 53969 - DNA, 34 bp, synthetic construct; identical to SEQ ID NO: 5909
  misc_feature 1..34: note = Probe
  source 1..34: mol_type = other DNA

SEQ ID NO: 53970 - DNA, 35 bp, synthetic construct; identical to SEQ ID NO: 5910
  misc_feature 1..35: note = Probe
  source 1..35: mol_type = other DNA

SEQ ID NO: 53971 - DNA, 36 bp, synthetic construct; identical to SEQ ID NO: 5911
  misc_feature 1..36: note = Probe
  source 1..36: mol_type = other DNA

SEQ ID NO: 53972 - DNA, 37 bp, synthetic construct; identical to SEQ ID NO: 5912
  misc_feature 1..37: note = Probe
  source 1..37: mol_type = other DNA

SEQ ID NO: 53973 - DNA, 42 bp, synthetic construct; identical to SEQ ID NO: 5913
  misc_feature 1..42: note = Probe
  source 1..42: mol_type = other DNA

SEQ ID NO: 53974 - DNA, 44 bp, synthetic construct; identical to SEQ ID NO: 1018
  misc_feature 1..44: note = Probe
  source 1..44: mol_type = other DNA

SEQ ID NO: 53975 - DNA, 45 bp, synthetic construct; identical to SEQ ID NO: 5915
  misc_feature 1..45: note = Probe
  source 1..45: mol_type = other DNA

SEQ ID NO: 53976 - DNA, 46 bp, synthetic construct; identical to SEQ ID NO: 5916
  misc_feature 1..46: note = Probe
  source 1..46: mol_type = other DNA

SEQ ID NO: 53977 - DNA, 47 bp, synthetic construct; identical to SEQ ID NO: 5917
  misc_feature 1..47: note = Probe
  source 1..47: mol_type = other DNA

SEQ ID NO: 53978 - DNA, 48 bp, synthetic construct; identical to SEQ ID NO: 5918
  misc_feature 1..48: note = Probe
  source 1..48: mol_type = other DNA

SEQ ID NO: 53979 - DNA, 37 bp, synthetic construct; identical to SEQ ID NO: 5919
  misc_feature 1..37: note = Probe
  source 1..37: mol_type = other DNA

SEQ ID NO: 53980 - DNA, 38 bp, synthetic construct; identical to SEQ ID NO: 20705
  misc_feature 1..38: note = Probe
  source 1..38: mol_type = other DNA

SEQ ID NO: 53981 - DNA, 22 bp, synthetic construct
  misc_feature 1..22: note = Probe
  source 1..22: mol_type = other DNA
gccacgcgggaggcccgggttc

SEQ ID NO: 53982 - DNA, 38 bp, synthetic construct; identical to SEQ ID NO: 40267
  misc_feature 1..38: note = Probe
  source 1..38: mol_type = other DNA

SEQ ID NO: 53983 - DNA, 39 bp, synthetic construct; identical to SEQ ID NO: 5925
  misc_feature 1..39: note = Probe
  source 1..39: mol_type = other DNA

SEQ ID NO: 53984 - DNA, 44 bp, synthetic construct
  misc_feature 1..44: note = Probe
  source 1..44: mol_type = other DNA
gccacgcgggaggcccgggttcgattcccggccaatgcaagttt

SEQ ID NO: 53985 - DNA, 45 bp, synthetic construct
  misc_feature 1..45: note = Probe
  source 1..45: mol_type = other DNA
gccacgcgggaggcccgggttcgattcccggccaatgcaagtttt

SEQ ID NO: 53986 - DNA, 42 bp, synthetic construct; identical to SEQ ID NO: 5926
  misc_feature 1..42: note = Probe
  source 1..42: mol_type = other DNA

SEQ ID NO: 53987 - DNA, 44 bp, synthetic construct; identical to SEQ ID NO: 48392
  misc_feature 1..44: note = Probe
  source 1..44: mol_type = other DNA

SEQ ID NO: 53988 - DNA, 42 bp, synthetic construct; identical to SEQ ID NO: 20722
  misc_feature 1..42: note = Probe
  source 1..42: mol_type = other DNA

SEQ ID NO: 53989 - DNA, 42 bp, synthetic construct; identical to SEQ ID NO: 5929
  misc_feature 1..42: note = Probe
  source 1..42: mol_type = other DNA

SEQ ID NO: 53990 - DNA, 44 bp, synthetic construct
  misc_feature 1..44: note = Probe
  source 1..44: mol_type = other DNA
gccacgcgggaggcccgggttcgattcccggcccatgcagcacg

SEQ ID NO: 53991 - DNA, 23 bp, synthetic construct
  misc_feature 1..23: note = Probe
  source 1..23: mol_type = other DNA
gccacgcgggaggcccgggtttg

SEQ ID NO: 53992 - DNA, 16 bp, synthetic construct
  misc_feature 1..16: note = Probe
  source 1..16: mol_type = other DNA
gccagggattgtgggt

SEQ ID NO: 53993 - DNA, 31 bp, synthetic construct; identical to SEQ ID NO: 5936
  misc_feature 1..31: note = Probe
  source 1..31: mol_type = other DNA

SEQ ID NO: 53994 - DNA, 32 bp, synthetic construct; identical to SEQ ID NO: 5937
  misc_feature 1..32: note = Probe
  source 1..32: mol_type = other DNA

SEQ ID NO: 53995 - DNA, 46 bp, synthetic construct; identical to SEQ ID NO: 5942
  misc_feature 1..46: note = Probe
  source 1..46: mol_type = other DNA

SEQ ID NO: 53996 - DNA, 44 bp, synthetic construct; identical to SEQ ID NO: 5949
  misc_feature 1..44: note = Probe
  source 1..44: mol_type = other DNA

SEQ ID NO: 53997 - DNA, 20 bp, synthetic construct
  misc_feature 1..20: note = Probe
  source 1..20: mol_type = other DNA
gccccaaacccactccacct

SEQ ID NO: 53998 - DNA, 36 bp, synthetic construct; identical to SEQ ID NO: 1025
  misc_feature 1..36: note = Probe
  source 1..36: mol_type = other DNA

SEQ ID NO: 53999 - DNA, 15 bp, synthetic construct
  misc_feature 1..15: note = Probe
  source 1..15: mol_type = other DNA
gcccccatgtctaac

SEQ ID NO: 54000 - DNA, 16 bp, synthetic construct
  misc_feature 1..16: note = Probe
  source 1..16: mol_type = other DNA
gcccccatgtctaaca

SEQ ID NO: 54001 - DNA, 17 bp, synthetic construct
  misc_feature 1..17: note = Probe
  source 1..17: mol_type = other DNA
gcccccatgtctaacaa

SEQ ID NO: 54002 - DNA, 18 bp, synthetic construct
  misc_feature 1..18: note = Probe
  source 1..18: mol_type = other DNA
gcccccatgtctaacaac

SEQ ID NO: 54003 - DNA, 19 bp, synthetic construct
  misc_feature 1..19: note = Probe
  source 1..19: mol_type = other DNA
gcccccatgtctaacaaca

SEQ ID NO: 54004 - DNA, 20 bp, synthetic construct
  misc_feature 1..20: note = Probe
  source 1..20: mol_type = other DNA
gcccccatgtctaacaacat

SEQ ID NO: 54005 - DNA, 21 bp, synthetic construct
  misc_feature 1..21: note = Probe
  source 1..21: mol_type = other DNA
gcccccatgtctaacaacatg

SEQ ID NO: 54006 - DNA, 22 bp, synthetic construct
  misc_feature 1..22: note = Probe
  source 1..22: mol_type = other DNA
gcccccatgtctaacaacatgg

SEQ ID NO: 54007 - DNA, 23 bp, synthetic construct
  misc_feature 1..23: note = Probe
  source 1..23: mol_type = other DNA
gcccccatgtctaacaacatggc

SEQ ID NO: 54008 - DNA, 24 bp, synthetic construct
  misc_feature 1..24: note = Probe
  source 1..24: mol_type = other DNA
gcccccatgtctaacaacatggct

SEQ ID NO: 54009 - DNA, 25 bp, synthetic construct
  misc_feature 1..25: note = Probe
  source 1..25: mol_type = other DNA
gcccccatgtctaacaacatggctt

SEQ ID NO: 54010 - DNA, 26 bp, synthetic construct
  misc_feature 1..26: note = Probe
  source 1..26: mol_type = other DNA
gcccccatgtctaacaacatggcttt

SEQ ID NO: 54011 - DNA, 27 bp, synthetic construct
  misc_feature 1..27: note = Probe
  source 1..27: mol_type = other DNA
gcccccatgtctaacaacatggctttc

SEQ ID NO: 54012 - DNA, 28 bp, synthetic construct
  misc_feature 1..28: note = Probe
  source 1..28: mol_type = other DNA
gcccccatgtctaacaacatggctttct

SEQ ID NO: 54013 - DNA, 29 bp, synthetic construct
  misc_feature 1..29: note = Probe
  source 1..29: mol_type = other DNA
gcccccatgtctaacaacatggctttctc

SEQ ID NO: 54014 - DNA, 30 bp, synthetic construct; identical to SEQ ID NO: 5966
  misc_feature 1..30: note = Probe
  source 1..30: mol_type = other DNA

SEQ ID NO: 54015 - DNA, 31 bp, synthetic construct; identical to SEQ ID NO: 5967
  misc_feature 1..31: note = Probe
  source 1..31: mol_type = other DNA

SEQ ID NO: 54016 - DNA, 32 bp, synthetic construct; identical to SEQ ID NO: 5968
  misc_feature 1..32: note = Probe
  source 1..32: mol_type = other DNA

SEQ ID NO: 54017 - DNA, 33 bp, synthetic construct; identical to SEQ ID NO: 5969
  misc_feature 1..33: note = Probe
  source 1..33: mol_type = other DNA

SEQ ID NO: 54018 - DNA, 34 bp, synthetic construct; identical to SEQ ID NO: 5970
  misc_feature 1..34: note = Probe
  source 1..34: mol_type = other DNA

SEQ ID NO: 54019 - DNA, 35 bp, synthetic construct; identical to SEQ ID NO: 5971
  misc_feature 1..35: note = Probe
  source 1..35: mol_type = other DNA

SEQ ID NO: 54020 - DNA, 36 bp, synthetic construct; identical to SEQ ID NO: 5972
  misc_feature 1..36: note = Probe
  source 1..36: mol_type = other DNA

SEQ ID NO: 54021 - DNA, 37 bp, synthetic construct; identical to SEQ ID NO: 5973
  misc_feature 1..37: note = Probe
  source 1..37: mol_type = other DNA

SEQ ID NO: 54022 - DNA, 38 bp, synthetic construct; identical to SEQ ID NO: 5974
  misc_feature 1..38: note = Probe
  source 1..38: mol_type = other DNA

SEQ ID NO: 54023 - DNA, 39 bp, synthetic construct; identical to SEQ ID NO: 5975
  misc_feature 1..39: note = Probe
  source 1..39: mol_type = other DNA

SEQ ID NO: 54024 - DNA, 40 bp, synthetic construct; identical to SEQ ID NO: 5976
  misc_feature 1..40: note = Probe
  source 1..40: mol_type = other DNA

SEQ ID NO: 54025 - DNA, 16 bp, synthetic construct
  misc_feature 1..16: note = Probe
  source 1..16: mol_type = other DNA
gcccggatagctcagt

SEQ ID NO: 54026 - DNA, 17 bp, synthetic construct
  misc_feature 1..17: note = Probe
  source 1..17: mol_type = other DNA
gcccggatagctcagtc

SEQ ID NO: 54027 - DNA, 20 bp, synthetic construct
  misc_feature 1..20: note = Probe
  source 1..20: mol_type = other DNA
gcccggatagctcagtcggt

SEQ ID NO: 54028 - DNA, 24 bp, synthetic construct
  misc_feature 1..24: note = Probe
  source 1..24: mol_type = other DNA
gcccggatagctcagtcggtagag

SEQ ID NO: 54029 - DNA, 28 bp, synthetic construct
  misc_feature 1..28: note = Probe
  source 1..28: mol_type = other DNA
gcccggatagctcagtcggtagagcatc

SEQ ID NO: 54030 - DNA, 37 bp, synthetic construct; identical to SEQ ID NO: 1045
  misc_feature 1..37: note = Probe
  source 1..37: mol_type = other DNA

SEQ ID NO: 54031 - DNA, 38 bp, synthetic construct; identical to SEQ ID NO: 5987
  misc_feature 1..38: note = Probe
  source 1..38: mol_type = other DNA

SEQ ID NO: 54032 - DNA, 40 bp, synthetic construct; identical to SEQ ID NO: 13517
  misc_feature 1..40: note = Probe
  source 1..40: mol_type = other DNA

SEQ ID NO: 54033 - DNA, 50 bp, synthetic construct; identical to SEQ ID NO: 1046
  misc_feature 1..50: note = Probe
  source 1..50: mol_type = other DNA

SEQ ID NO: 54034 - DNA, 31 bp, synthetic construct; identical to SEQ ID NO: 20818
  misc_feature 1..31: note = Probe
  source 1..31: mol_type = other DNA

SEQ ID NO: 54035 - DNA, 19 bp, synthetic construct
  misc_feature 1..19: note = Probe
  source 1..19: mol_type = other DNA
gcccggctagctcagtcga

SEQ ID NO: 54036 - DNA, 31 bp, synthetic construct; identical to SEQ ID NO: 1050
  misc_feature 1..31: note = Probe
  source 1..31: mol_type = other DNA

SEQ ID NO: 54037 - DNA, 32 bp, synthetic construct; identical to SEQ ID NO: 5994
  misc_feature 1..32: note = Probe
  source 1..32: mol_type = other DNA

SEQ ID NO: 54038 - DNA, 19 bp, synthetic construct
  misc_feature 1..19: note = Probe
  source 1..19: mol_type = other DNA
gcccggctagctcagtcgg

SEQ ID NO: 54039 - DNA, 33 bp, synthetic construct; identical to SEQ ID NO: 1065
  misc_feature 1..33: note = Probe
  source 1..33: mol_type = other DNA

SEQ ID NO: 54040 - DNA, 35 bp, synthetic construct; identical to SEQ ID NO: 1072
  misc_feature 1..35: note = Probe
  source 1..35: mol_type = other DNA

SEQ ID NO: 54041 - DNA, 37 bp, synthetic construct; identical to SEQ ID NO: 1074
  misc_feature 1..37: note = Probe
  source 1..37: mol_type = other DNA

SEQ ID NO: 54042 - DNA, 38 bp, synthetic construct; identical to SEQ ID NO: 13544
  misc_feature 1..38: note = Probe
  source 1..38: mol_type = other DNA

SEQ ID NO: 54043 - DNA, 39 bp, synthetic construct; identical to SEQ ID NO: 1075
  misc_feature 1..39: note = Probe
  source 1..39: mol_type = other DNA

SEQ ID NO: 54044 - DNA, 45 bp, synthetic construct; identical to SEQ ID NO: 5998
  misc_feature 1..45: note = Probe
  source 1..45: mol_type = other DNA

SEQ ID NO: 54045 - DNA, 49 bp, synthetic construct; identical to SEQ ID NO: 5999
  misc_feature 1..49: note = Probe
  source 1..49: mol_type = other DNA

SEQ ID NO: 54046 - DNA, 37 bp, synthetic construct; identical to SEQ ID NO: 1087
  misc_feature 1..37: note = Probe
  source 1..37: mol_type = other DNA

SEQ ID NO: 54047 - DNA, 38 bp, synthetic construct; identical to SEQ ID NO: 6000
  misc_feature 1..38: note = Probe
  source 1..38: mol_type = other DNA

SEQ ID NO: 54048 - DNA, 39 bp, synthetic construct; identical to SEQ ID NO: 6001
  misc_feature 1..39: note = Probe
  source 1..39: mol_type = other DNA

SEQ ID NO: 54049 - DNA, 40 bp, synthetic construct; identical to SEQ ID NO: 1088
  misc_feature 1..40: note = Probe
  source 1..40: mol_type = other DNA

SEQ ID NO: 54050 - DNA, 41 bp, synthetic construct; identical to SEQ ID NO: 6002
  misc_feature 1..41: note = Probe
  source 1..41: mol_type = other DNA

SEQ ID NO: 54051 - DNA, 43 bp, synthetic construct; identical to SEQ ID NO: 6003
  misc_feature 1..43: note = Probe
  source 1..43: mol_type = other DNA

SEQ ID NO: 54052 - DNA, 44 bp, synthetic construct
  misc_feature 1..44: note = Probe
  source 1..44: mol_type = other DNA
gcccggctagctcagtcggtagagcatgggactcttaatcccag

SEQ ID NO: 54053 - DNA, 46 bp, synthetic construct; identical to SEQ ID NO: 6004
  misc_feature 1..46: note = Probe
  source 1..46: mol_type = other DNA

SEQ ID NO: 54054 - DNA, 47 bp, synthetic construct; identical to SEQ ID NO: 48497
  misc_feature 1..47: note = Probe
  source 1..47: mol_type = other DNA

SEQ ID NO: 54055 - DNA, 48 bp, synthetic construct; identical to SEQ ID NO: 6005
  misc_feature 1..48: note = Probe
  source 1..48: mol_type = other DNA

SEQ ID NO: 54056 - DNA, 23 bp, synthetic construct
  misc_feature 1..23: note = Probe
  source 1..23: mol_type = other DNA
gcccggtaatcgcataaaactta

SEQ ID NO: 54057 - DNA, 29 bp, synthetic construct
  misc_feature 1..29: note = Probe
  source 1..29: mol_type = other DNA
gcccggtaatcgcataaaacttaaaactt

SEQ ID NO: 54058 - DNA, 37 bp, synthetic construct; identical to SEQ ID NO: 1093
  misc_feature 1..37: note = Probe
  source 1..37: mol_type = other DNA

SEQ ID NO: 54059 - DNA, 50 bp, synthetic construct; identical to SEQ ID NO: 6012
  misc_feature 1..50: note = Probe
  source 1..50: mol_type = other DNA

SEQ ID NO: 54060 - DNA, 19 bp, synthetic construct
  misc_feature 1..19: note = Probe
  source 1..19: mol_type = other DNA
gccgaaatagctcagttgg

SEQ ID NO: 54061 - DNA, 21 bp, synthetic construct
  misc_feature 1..21: note = Probe
  source 1..21: mol_type = other DNA
gccgaaatagctcagttggga

SEQ ID NO: 54062 - DNA, 22 bp, synthetic construct
  misc_feature 1..22: note = Probe
  source 1..22: mol_type = other DNA
gccgaaatagctcagttgggag

SEQ ID NO: 54063 - DNA, 23 bp, synthetic construct
  misc_feature 1..23: note = Probe
  source 1..23: mol_type = other DNA
gccgaaatagctcagttgggaga

SEQ ID NO: 54064 - DNA, 24 bp, synthetic construct
  misc_feature 1..24: note = Probe
  source 1..24: mol_type = other DNA
gccgaaatagctcagttgggagag

SEQ ID NO: 54065 - DNA, 25 bp, synthetic construct
  misc_feature 1..25: note = Probe
  source 1..25: mol_type = other DNA
gccgaaatagctcagttgggagagc

SEQ ID NO: 54066 - DNA, 26 bp, synthetic construct
  misc_feature 1..26: note = Probe
  source 1..26: mol_type = other DNA
gccgctggtgtagtggtatcatgcaa

SEQ ID NO: 54067 - DNA, 27 bp, synthetic construct
  misc_feature 1..27: note = Probe
  source 1..27: mol_type = other DNA
gccgctggtgtagtggtatcatgcaag

SEQ ID NO: 54068 - DNA, 28 bp, synthetic construct
  misc_feature 1..28: note = Probe
  source 1..28: mol_type = other DNA
gccgctggtgtagtggtatcatgcaaga

SEQ ID NO: 54069 - DNA, 33 bp, synthetic construct; identical to SEQ ID NO: 1103
  misc_feature 1..33: note = Probe
  source 1..33: mol_type = other DNA

SEQ ID NO: 54070 - DNA, 16 bp, synthetic construct
  misc_feature 1..16: note = Probe
  source 1..16: mol_type = other DNA
gccgtgatcgtatagt

SEQ ID NO: 54071 - DNA, 23 bp, synthetic construct
  misc_feature 1..23: note = Probe
  source 1..23: mol_type = other DNA
gccgtgatcgtatagtggttagt

SEQ ID NO: 54072 - DNA, 25 bp, synthetic construct
  misc_feature 1..25: note = Probe
  source 1..25: mol_type = other DNA
gccgtgatcgtatagtggttagtac

SEQ ID NO: 54073 - DNA, 26 bp, synthetic construct
  misc_feature 1..26: note = Probe
  source 1..26: mol_type = other DNA
gccgtgatcgtatagtggttagtact

SEQ ID NO: 54074 - DNA, 31 bp, synthetic construct; identical to SEQ ID NO: 1106
  misc_feature 1..31: note = Probe
  source 1..31: mol_type = other DNA

SEQ ID NO: 54075 - DNA, 35 bp, synthetic construct; identical to SEQ ID NO: 1110
  misc_feature 1..35: note = Probe
  source 1..35: mol_type = other DNA

SEQ ID NO: 54076 - DNA, 50 bp, synthetic construct; identical to SEQ ID NO: 6040
  misc_feature 1..50: note = Probe
  source 1..50: mol_type = other DNA

SEQ ID NO: 54077 - DNA, 25 bp, synthetic construct
  misc_feature 1..25: note = Probe
  source 1..25: mol_type = other DNA
gcctcacacgcgaaaggtccccggt

SEQ ID NO: 54078 - DNA, 26 bp, synthetic construct
  misc_feature 1..26: note = Probe
  source 1..26: mol_type = other DNA
gcctcctaagccagggattgtgggtt

SEQ ID NO: 54079 - DNA, 31 bp, synthetic construct; identical to SEQ ID NO: 48554
  misc_feature 1..31: note = Probe
  source 1..31: mol_type = other DNA

SEQ ID NO: 54080 - DNA, 32 bp, synthetic construct
  misc_feature 1..32: note = Probe
  source 1..32: mol_type = other DNA
gcctcgttagcgcagtaggcagcgcgtcagtc

SEQ ID NO: 54081 - DNA, 23 bp, synthetic construct
  misc_feature 1..23: note = Probe
  source 1..23: mol_type = other DNA
gcctcgttagcgcagtaggtagc

SEQ ID NO: 54082 - DNA, 25 bp, synthetic construct
  misc_feature 1..25: note = Probe
  source 1..25: mol_type = other DNA
gcctcgttagcgcagtaggtagcgc

SEQ ID NO: 54083 - DNA, 31 bp, synthetic construct; identical to SEQ ID NO: 6052
  misc_feature 1..31: note = Probe
  source 1..31: mol_type = other DNA

SEQ ID NO: 54084 - DNA, 50 bp, synthetic construct
  misc_feature 1..50: note = Probe
  source 1..50: mol_type = other DNA
gcctcgttagcgcagtaggtagcgcgtcagtctcataatctgaaggtcgt

SEQ ID NO: 54085 - DNA, 24 bp, synthetic construct
  misc_feature 1..24: note = Probe
  source 1..24: mol_type = other DNA
gcctgccacgcgggaggcccgggt

SEQ ID NO: 54086 - DNA, 25 bp, synthetic construct
  misc_feature 1..25: note = Probe
  source 1..25: mol_type = other DNA
gcctgccacgcgggaggcccgggtt

SEQ ID NO: 54087 - DNA, 32 bp, synthetic construct; identical to SEQ ID NO: 1116
  misc_feature 1..32: note = Probe
  source 1..32: mol_type = other DNA

SEQ ID NO: 54088 - DNA, 33 bp, synthetic construct; identical to SEQ ID NO: 1117
  misc_feature 1..33: note = Probe
  source 1..33: mol_type = other DNA

SEQ ID NO: 54089 - DNA, 31 bp, synthetic construct; identical to SEQ ID NO: 1120
  misc_feature 1..31: note = Probe
  source 1..31: mol_type = other DNA

SEQ ID NO: 54090 - DNA, 33 bp, synthetic construct; identical to SEQ ID NO: 1122
  misc_feature 1..33: note = Probe
  source 1..33: mol_type = other DNA

SEQ ID NO: 54091 - DNA, 17 bp, synthetic construct
  misc_feature 1..17: note = Probe
  source 1..17: mol_type = other DNA
gcctgtcacgcgggaga

SEQ ID NO: 54092 - DNA, 25 bp, synthetic construct
  misc_feature 1..25: note = Probe
  source 1..25: mol_type = other DNA
gcctgtcacgcgggagaccggggtt

SEQ ID NO: 54093 - DNA, 46 bp, synthetic construct; identical to SEQ ID NO: 6066
  misc_feature 1..46: note = Probe
  source 1..46: mol_type = other DNA

SEQ ID NO: 54094 - DNA, 16 bp, synthetic construct
  misc_feature 1..16: note = Probe
  source 1..16: mol_type = other DNA
gcgagaggtcccgggt

SEQ ID NO: 54095 - DNA, 17 bp, synthetic construct
  misc_feature 1..17: note = Probe
  source 1..17: mol_type = other DNA
gcgagaggtcccgggtt

SEQ ID NO: 54096 - DNA, 16 bp, synthetic construct
  misc_feature 1..16: note = Probe
  source 1..16: mol_type = other DNA
gcgccgctggtgtagt

SEQ ID NO: 54097 - DNA, 24 bp, synthetic construct
  misc_feature 1..24: note = Probe
  source 1..24: mol_type = other DNA
gcgccgctggtgtagtggtatcat

SEQ ID NO: 54098 - DNA, 38 bp, synthetic construct; identical to SEQ ID NO: 6089
  misc_feature 1..38: note = Probe
  source 1..38: mol_type = other DNA

SEQ ID NO: 54099 - DNA, 42 bp, synthetic construct; identical to SEQ ID NO: 6090
  misc_feature 1..42: note = Probe
  source 1..42: mol_type = other DNA

SEQ ID NO: 54100 - DNA, 43 bp, synthetic construct; identical to SEQ ID NO: 6091
  misc_feature 1..43: note = Probe
  source 1..43: mol_type = other DNA

SEQ ID NO: 54101 - DNA, 47 bp, synthetic construct; identical to SEQ ID NO: 6094
  misc_feature 1..47: note = Probe
  source 1..47: mol_type = other DNA

SEQ ID NO: 54102 - DNA, 48 bp, synthetic construct; identical to SEQ ID NO: 6095
  misc_feature 1..48: note = Probe
  source 1..48: mol_type = other DNA

SEQ ID NO: 54103 - DNA, 16 bp, synthetic construct
  misc_feature 1..16: note = Probe
  source 1..16: mol_type = other DNA
gcgctctcaccgccgc

SEQ ID NO: 54104 - DNA, 22 bp, synthetic construct
  misc_feature 1..22: note = Probe
  source 1..22: mol_type = other DNA
gcgctctcaccgccgcggcccg

SEQ ID NO: 54105 - DNA, 37 bp, synthetic construct; identical to SEQ ID NO: 6121
  misc_feature 1..37: note = Probe
  source 1..37: mol_type = other DNA

SEQ ID NO: 54106 - DNA, 16 bp, synthetic construct
  misc_feature 1..16: note = Probe
  source 1..16: mol_type = other DNA
gcgggaggcccgggtt

SEQ ID NO: 54107 - DNA, 17 bp, synthetic construct
  misc_feature 1..17: note = Probe
  source 1..17: mol_type = other DNA
gcggttaggattcctgg

SEQ ID NO: 54108 - DNA, 25 bp, synthetic construct
  misc_feature 1..25: note = Probe
  source 1..25: mol_type = other DNA
gcggttaggattcctggttttcacc

SEQ ID NO: 54109 - DNA, 35 bp, synthetic construct
  misc_feature 1..35: note = Probe
  source 1..35: mol_type = other DNA
gcggttaggattcctggttttcacccaggcggccc

SEQ ID NO: 54110 - DNA, 29 bp, synthetic construct
  misc_feature 1..29: note = Probe
  source 1..29: mol_type = other DNA
gcgtgctgggcccataacccagaggtcga

SEQ ID NO: 54111 - DNA, 24 bp, synthetic construct
  misc_feature 1..24: note = Probe
  source 1..24: mol_type = other DNA
gcgttggtggtatagtggtaagca

SEQ ID NO: 54112 - DNA, 26 bp, synthetic construct
  misc_feature 1..26: note = Probe
  source 1..26: mol_type = other DNA
gcgttggtggtatagtggtaagcata

SEQ ID NO: 54113 - DNA, 27 bp, synthetic construct
  misc_feature 1..27: note = Probe
  source 1..27: mol_type = other DNA
gcgttggtggtatagtggtaagcatag

SEQ ID NO: 54114 - DNA, 29 bp, synthetic construct
  misc_feature 1..29: note = Probe
  source 1..29: mol_type = other DNA
gcgttggtggtatagtggtaagcatagct

SEQ ID NO: 54115 - DNA, 30 bp, synthetic construct; identical to SEQ ID NO: 1183
  misc_feature 1..30: note = Probe
  source 1..30: mol_type = other DNA

SEQ ID NO: 54116 - DNA, 31 bp, synthetic construct; identical to SEQ ID NO: 1184
  misc_feature 1..31: note = Probe
  source 1..31: mol_type = other DNA

SEQ ID NO: 54117 - DNA, 32 bp, synthetic construct; identical to SEQ ID NO: 1185
  misc_feature 1..32: note = Probe
  source 1..32: mol_type = other DNA

SEQ ID NO: 54118 - DNA, 34 bp, synthetic construct; identical to SEQ ID NO: 1187
  misc_feature 1..34: note = Probe
  source 1..34: mol_type = other DNA

SEQ ID NO: 54119 - DNA, 36 bp, synthetic construct; identical to SEQ ID NO: 1189
  misc_feature 1..36: note = Probe
  source 1..36: mol_type = other DNA

SEQ ID NO: 54120 - DNA, 39 bp, synthetic construct; identical to SEQ ID NO: 21123
  misc_feature 1..39: note = Probe
  source 1..39: mol_type = other DNA

SEQ ID NO: 54121 - DNA, 40 bp, synthetic construct; identical to SEQ ID NO: 6137
  misc_feature 1..40: note = Probe
  source 1..40: mol_type = other DNA

SEQ ID NO: 54122 - DNA, 43 bp, synthetic construct; identical to SEQ ID NO: 6138
  misc_feature 1..43: note = Probe
  source 1..43: mol_type = other DNA

SEQ ID NO: 54123 - DNA, 47 bp, synthetic construct
  misc_feature 1..47: note = Probe
  source 1..47: mol_type = other DNA
gcgttggtggtatagtggtaagcatagctgccttccaagcagttgac

SEQ ID NO: 54124 - DNA, 48 bp, synthetic construct; identical to SEQ ID NO: 6139
  misc_feature 1..48: note = Probe
  source 1..48: mol_type = other DNA

SEQ ID NO: 54125 - DNA, 49 bp, synthetic construct; identical to SEQ ID NO: 6140
  misc_feature 1..49: note = Probe
  source 1..49: mol_type = other DNA

SEQ ID NO: 54126 - DNA, 23 bp, synthetic construct
  misc_feature 1..23: note = Probe
  source 1..23: mol_type = other DNA
gcgttggtggtatagtggtgagc

SEQ ID NO: 54127 - DNA, 24 bp, synthetic construct
  misc_feature 1..24: note = Probe
  source 1..24: mol_type = other DNA
gcgttggtggtatagtggtgagca

SEQ ID NO: 54128 - DNA, 26 bp, synthetic construct
  misc_feature 1..26: note = Probe
  source 1..26: mol_type = other DNA
gcgttggtggtatagtggtgagcata

SEQ ID NO: 54129 - DNA, 27 bp, synthetic construct
  misc_feature 1..27: note = Probe
  source 1..27: mol_type = other DNA
gcgttggtggtatagtggtgagcatag

SEQ ID NO: 54130 - DNA, 28 bp, synthetic construct
  misc_feature 1..28: note = Probe
  source 1..28: mol_type = other DNA
gcgttggtggtatagtggtgagcatagc

SEQ ID NO: 54131 - DNA, 29 bp, synthetic construct
  misc_feature 1..29: note = Probe
  source 1..29: mol_type = other DNA
gcgttggtggtatagtggtgagcatagct

SEQ ID NO: 54132 - DNA, 30 bp, synthetic construct; identical to SEQ ID NO: 6150
  misc_feature 1..30: note = Probe
  source 1..30: mol_type = other DNA

SEQ ID NO: 54133 - DNA, 31 bp, synthetic construct; identical to SEQ ID NO: 6151
  misc_feature 1..31: note = Probe
  source 1..31: mol_type = other DNA

SEQ ID NO: 54134 - DNA, 32 bp, synthetic construct; identical to SEQ ID NO: 6152
  misc_feature 1..32: note = Probe
  source 1..32: mol_type = other DNA

SEQ ID NO: 54135 - DNA, 33 bp, synthetic construct; identical to SEQ ID NO: 6153
  misc_feature 1..33: note = Probe
  source 1..33: mol_type = other DNA

SEQ ID NO: 54136 - DNA, 34 bp, synthetic construct; identical to SEQ ID NO: 6154
  misc_feature 1..34: note = Probe
  source 1..34: mol_type = other DNA

SEQ ID NO: 54137 - DNA, 35 bp, synthetic construct; identical to SEQ ID NO: 6155
  misc_feature 1..35: note = Probe
  source 1..35: mol_type = other DNA

SEQ ID NO: 54138 - DNA, 36 bp, synthetic construct; identical to SEQ ID NO: 6156
  misc_feature 1..36: note = Probe
  source 1..36: mol_type = other DNA

SEQ ID NO: 54139 - DNA, 37 bp, synthetic construct; identical to SEQ ID NO: 6157
  misc_feature 1..37: note = Probe
  source 1..37: mol_type = other DNA

SEQ ID NO: 54140 - DNA, 39 bp, synthetic construct; identical to SEQ ID NO: 6158
  misc_feature 1..39: note = Probe
  source 1..39: mol_type = other DNA

SEQ ID NO: 54141 - DNA, 40 bp, synthetic construct; identical to SEQ ID NO: 1193
  misc_feature 1..40: note = Probe
  source 1..40: mol_type = other DNA

SEQ ID NO: 54142 - DNA, 41 bp, synthetic construct; identical to SEQ ID NO: 13692
  misc_feature 1..41: note = Probe
  source 1..41: mol_type = other DNA

SEQ ID NO: 54143 - DNA, 43 bp, synthetic construct; identical to SEQ ID NO: 6159
  misc_feature 1..43: note = Probe
  source 1..43: mol_type = other DNA

SEQ ID NO: 54144 - DNA, 48 bp, synthetic construct; identical to SEQ ID NO: 6163
  misc_feature 1..48: note = Probe
  source 1..48: mol_type = other DNA

SEQ ID NO: 54145 - DNA, 49 bp, synthetic construct; identical to SEQ ID NO: 6164
  misc_feature 1..49: note = Probe
  source 1..49: mol_type = other DNA

SEQ ID NO: 54146 - DNA, 24 bp, synthetic construct
  misc_feature 1..24: note = Probe
  source 1..24: mol_type = other DNA
gcgttggtggtatagtggttagca

SEQ ID NO: 54147 - DNA, 26 bp, synthetic construct
  misc_feature 1..26: note = Probe
  source 1..26: mol_type = other DNA
gcgttggtggtatagtggttagcata

SEQ ID NO: 54148 - DNA, 27 bp, synthetic construct
  misc_feature 1..27: note = Probe
  source 1..27: mol_type = other DNA
gcgttggtggtatagtggttagcatag

SEQ ID NO: 54149 - DNA, 29 bp, synthetic construct
  misc_feature 1..29: note = Probe
  source 1..29: mol_type = other DNA
gcgttggtggtatagtggttagcatagct

SEQ ID NO: 54150 - DNA, 30 bp, synthetic construct; identical to SEQ ID NO: 6172
  misc_feature 1..30: note = Probe
  source 1..30: mol_type = other DNA

SEQ ID NO: 54151 - DNA, 31 bp, synthetic construct; identical to SEQ ID NO: 6173
  misc_feature 1..31: note = Probe
  source 1..31: mol_type = other DNA

SEQ ID NO: 54152 - DNA, 32 bp, synthetic construct; identical to SEQ ID NO: 6174
  misc_feature 1..32: note = Probe
  source 1..32: mol_type = other DNA

SEQ ID NO: 54153 - DNA, 33 bp, synthetic construct; identical to SEQ ID NO: 6175
  misc_feature 1..33: note = Probe
  source 1..33: mol_type = other DNA

SEQ ID NO: 54154 - DNA, 34 bp, synthetic construct; identical to SEQ ID NO: 6176
  misc_feature 1..34: note = Probe
  source 1..34: mol_type = other DNA

SEQ ID NO: 54155 - DNA, 35 bp, synthetic construct; identical to SEQ ID NO: 6177
  misc_feature 1..35: note = Probe
  source 1..35: mol_type = other DNA

SEQ ID NO: 54156 - DNA, 36 bp, synthetic construct; identical to SEQ ID NO: 6178
  misc_feature 1..36: note = Probe
  source 1..36: mol_type = other DNA

SEQ ID NO: 54157 - DNA, 39 bp, synthetic construct; identical to SEQ ID NO: 6180
  misc_feature 1..39: note = Probe
  source 1..39: mol_type = other DNA

SEQ ID NO: 54158 - DNA, 40 bp, synthetic construct; identical to SEQ ID NO: 6181
  misc_feature 1..40: note = Probe
  source 1..40: mol_type = other DNA

SEQ ID NO: 54159 - DNA, 43 bp, synthetic construct; identical to SEQ ID NO: 6182
  misc_feature 1..43: note = Probe
  source 1..43: mol_type = other DNA

SEQ ID NO: 54160 - DNA, 48 bp, synthetic construct; identical to SEQ ID NO: 6184
  misc_feature 1..48: note = Probe
  source 1..48: mol_type = other DNA

SEQ ID NO: 54161 - DNA, 49 bp, synthetic construct; identical to SEQ ID NO: 6185
  misc_feature 1..49: note = Probe
  source 1..49: mol_type = other DNA

SEQ ID NO: 54162 - DNA, 16 bp, synthetic construct
  misc_feature 1..16: note = Probe
  source 1..16: mol_type = other DNA
gctaaacctagcccca

SEQ ID NO: 54163 - DNA, 18 bp, synthetic construct
  misc_feature 1..18: note = Probe
  source 1..18: mol_type = other DNA
gctaaacctagccccaaa

SEQ ID NO: 54164 - DNA, 19 bp, synthetic construct
  misc_feature 1..19: note = Probe
  source 1..19: mol_type = other DNA
gctaaacctagccccaaac

SEQ ID NO: 54165 - DNA, 20 bp, synthetic construct
  misc_feature 1..20: note = Probe
  source 1..20: mol_type = other DNA
gctaaacctagccccaaacc

SEQ ID NO: 54166 - DNA, 21 bp, synthetic construct
  misc_feature 1..21: note = Probe
  source 1..21: mol_type = other DNA
gctaaacctagccccaaaccc

SEQ ID NO: 54167 - DNA, 22 bp, synthetic construct
  misc_feature 1..22: note = Probe
  source 1..22: mol_type = other DNA
gctaaacctagccccaaaccca

SEQ ID NO: 54168 - DNA, 23 bp, synthetic construct
  misc_feature 1..23: note = Probe
  source 1..23: mol_type = other DNA
gctaaacctagccccaaacccac

SEQ ID NO: 54169 - DNA, 24 bp, synthetic construct
  misc_feature 1..24: note = Probe
  source 1..24: mol_type = other DNA
gctaaacctagccccaaacccact

SEQ ID NO: 54170 - DNA, 25 bp, synthetic construct
  misc_feature 1..25: note = Probe
  source 1..25: mol_type = other DNA
gctaaacctagccccaaacccactc

SEQ ID NO: 54171 - DNA, 26 bp, synthetic construct
  misc_feature 1..26: note = Probe
  source 1..26: mol_type = other DNA
gctaaacctagccccaaacccactcc

SEQ ID NO: 54172 - DNA, 27 bp, synthetic construct
  misc_feature 1..27: note = Probe
  source 1..27: mol_type = other DNA
gctaaacctagccccaaacccactcca

SEQ ID NO: 54173 - DNA, 28 bp, synthetic construct
  misc_feature 1..28: note = Probe
  source 1..28: mol_type = other DNA
gctaaacctagccccaaacccactccac

SEQ ID NO: 54174 - DNA, 29 bp, synthetic construct
  misc_feature 1..29: note = Probe
  source 1..29: mol_type = other DNA
gctaaacctagccccaaacccactccacc

SEQ ID NO: 54175 - DNA, 30 bp, synthetic construct; identical to SEQ ID NO: 6203
  misc_feature 1..30: note = Probe
  source 1..30: mol_type = other DNA

SEQ ID NO: 54176 - DNA, 25 bp, synthetic construct
  misc_feature 1..25: note = Probe
  source 1..25: mol_type = other DNA
gctaaataagctatcgggcccatac

SEQ ID NO: 54177 - DNA, 23 bp, synthetic construct
  misc_feature 1..23: note = Probe
  source 1..23: mol_type = other DNA
gctaaatcctatatatcttaatg

SEQ ID NO: 54178 - DNA, 34 bp, synthetic construct; identical to SEQ ID NO: 6217
  misc_feature 1..34: note = Probe
  source 1..34: mol_type = other DNA

SEQ ID NO: 54179 - DNA, 35 bp, synthetic construct; identical to SEQ ID NO: 6218
  misc_feature 1..35: note = Probe
  source 1..35: mol_type = other DNA

SEQ ID NO: 54180 - DNA, 36 bp, synthetic construct; identical to SEQ ID NO: 6219
  misc_feature 1..36: note = Probe
  source 1..36: mol_type = other DNA

SEQ ID NO: 54181 - DNA, 38 bp, synthetic construct; identical to SEQ ID NO: 6221
  misc_feature 1..38: note = Probe
  source 1..38: mol_type = other DNA

SEQ ID NO: 54182 - DNA, 39 bp, synthetic construct; identical to SEQ ID NO: 6222
  misc_feature 1..39: note = Probe
  source 1..39: mol_type = other DNA

SEQ ID NO: 54183 - DNA, 40 bp, synthetic construct; identical to SEQ ID NO: 6223
  misc_feature 1..40: note = Probe
  source 1..40: mol_type = other DNA

SEQ ID NO: 54184 - DNA, 42 bp, synthetic construct; identical to SEQ ID NO: 6225
  misc_feature 1..42: note = Probe
  source 1..42: mol_type = other DNA

SEQ ID NO: 54185 - DNA, 43 bp, synthetic construct; identical to SEQ ID NO: 6226
  misc_feature 1..43: note = Probe
  source 1..43: mol_type = other DNA

SEQ ID NO: 54186 - DNA, 23 bp, synthetic construct
  misc_feature 1..23: note = Probe
  source 1..23: mol_type = other DNA
gctaaggaagtcctgtgctcagt

SEQ ID NO: 54187 - DNA, 24 bp, synthetic construct
  misc_feature 1..24: note = Probe
  source 1..24: mol_type = other DNA
gctaaggaagtcctgtgctcagtt

SEQ ID NO: 54188 - DNA, 24 bp, synthetic construct
  misc_feature 1..24: note = Probe
  source 1..24: mol_type = other DNA
gctaataacgccaaggtcgcgggt

SEQ ID NO: 54189 - DNA, 25 bp, synthetic construct
  misc_feature 1..25: note = Probe
  source 1..25: mol_type = other DNA
gctaataacgccaaggtcgcgggtt

SEQ ID NO: 54190 - DNA, 16 bp, synthetic construct
  misc_feature 1..16: note = Probe
  source 1..16: mol_type = other DNA
gctaatggtggagtta

SEQ ID NO: 54191 - DNA, 35 bp, synthetic construct; identical to SEQ ID NO: 6234
  misc_feature 1..35: note = Probe
  source 1..35: mol_type = other DNA

SEQ ID NO: 54192 - DNA, 37 bp, synthetic construct; identical to SEQ ID NO: 6235
  misc_feature 1..37: note = Probe
  source 1..37: mol_type = other DNA

SEQ ID NO: 54193 - DNA, 38 bp, synthetic construct; identical to SEQ ID NO: 6236
  misc_feature 1..38: note = Probe
  source 1..38: mol_type = other DNA

SEQ ID NO: 54194 - DNA, 39 bp, synthetic construct; identical to SEQ ID NO: 6237
  misc_feature 1..39: note = Probe
  source 1..39: mol_type = other DNA

SEQ ID NO: 54195 - DNA, 40 bp, synthetic construct; identical to SEQ ID NO: 6238
  misc_feature 1..40: note = Probe
  source 1..40: mol_type = other DNA

SEQ ID NO: 54196 - DNA, 41 bp, synthetic construct; identical to SEQ ID NO: 6239
  misc_feature 1..41: note = Probe
  source 1..41: mol_type = other DNA

SEQ ID NO: 54197 - DNA, 42 bp, synthetic construct; identical to SEQ ID NO: 6240
  misc_feature 1..42: note = Probe
  source 1..42: mol_type = other DNA

SEQ ID NO: 54198 - DNA, 22 bp, synthetic construct
  misc_feature 1..22: note = Probe
  source 1..22: mol_type = other DNA
gctacttttaaattctgacctc

SEQ ID NO: 54199 - DNA, 23 bp, synthetic construct
  misc_feature 1..23: note = Probe
  source 1..23: mol_type = other DNA
gctacttttaaattctgacctca

SEQ ID NO: 54200 - DNA, 24 bp, synthetic construct
  misc_feature 1..24: note = Probe
  source 1..24: mol_type = other DNA
gctacttttaaattctgacctcaa

SEQ ID NO: 54201 - DNA, 21 bp, synthetic construct
  misc_feature 1..21: note = Probe
  source 1..21: mol_type = other DNA
gctagctcagtcggtagagca

SEQ ID NO: 54202 - DNA, 23 bp, synthetic construct
  misc_feature 1..23: note = Probe
  source 1..23: mol_type = other DNA
gctagctcagtcggtagagcatg

SEQ ID NO: 54203 - DNA, 26 bp, synthetic construct
  misc_feature 1..26: note = Probe
  source 1..26: mol_type = other DNA
gctagctcagtcggtagagcatgaga

SEQ ID NO: 54204 - DNA, 27 bp, synthetic construct
  misc_feature 1..27: note = Probe
  source 1..27: mol_type = other DNA
gctagctcagtcggtagagcatgagac

SEQ ID NO: 54205 - DNA, 29 bp, synthetic construct
  misc_feature 1..29: note = Probe
  source 1..29: mol_type = other DNA
gctagctcagtcggtagagcatgagactc

SEQ ID NO: 54206 - DNA, 44 bp, synthetic construct
  misc_feature 1..44: note = Probe
  source 1..44: mol_type = other DNA
gctagctcagtcggtagagcatgagactcttaatctcagggtcg

SEQ ID NO: 54207 - DNA, 29 bp, synthetic construct
  misc_feature 1..29: note = Probe
  source 1..29: mol_type = other DNA
gctagctcagtcggtagagcatgggactc

SEQ ID NO: 54208 - DNA, 44 bp, synthetic construct; identical to SEQ ID NO: 21247
  misc_feature 1..44: note = Probe
  source 1..44: mol_type = other DNA

SEQ ID NO: 54209 - DNA, 50 bp, synthetic construct; identical to SEQ ID NO: 48788
  misc_feature 1..50: note = Probe
  source 1..50: mol_type = other DNA

SEQ ID NO: 54210 - DNA, 21 bp, synthetic construct
  misc_feature 1..21: note = Probe
  source 1..21: mol_type = other DNA
gctatcgggcccataccccga

SEQ ID NO: 54211 - DNA, 22 bp, synthetic construct
  misc_feature 1..22: note = Probe
  source 1..22: mol_type = other DNA
gctatcgggcccataccccgaa

SEQ ID NO: 54212 - DNA, 23 bp, synthetic construct
  misc_feature 1..23: note = Probe
  source 1..23: mol_type = other DNA
gctatcgggcccataccccgaaa

SEQ ID NO: 54213 - DNA, 24 bp, synthetic construct
  misc_feature 1..24: note = Probe
  source 1..24: mol_type = other DNA
gctatcgggcccataccccgaaaa

SEQ ID NO: 54214 - DNA, 25 bp, synthetic construct
  misc_feature 1..25: note = Probe
  source 1..25: mol_type = other DNA
gctatcgggcccataccccgaaaat

SEQ ID NO: 54215 - DNA, 26 bp, synthetic construct
  misc_feature 1..26: note = Probe
  source 1..26: mol_type = other DNA
gctatcgggcccataccccgaaaatg

SEQ ID NO: 54216 - DNA, 27 bp, synthetic construct
  misc_feature 1..27: note = Probe
  source 1..27: mol_type = other DNA
gctatcgggcccataccccgaaaatgt

SEQ ID NO: 54217 - DNA, 28 bp, synthetic construct
  misc_feature 1..28: note = Probe
  source 1..28: mol_type = other DNA
gctatcgggcccataccccgaaaatgtt

SEQ ID NO: 54218 - DNA, 29 bp, synthetic construct
  misc_feature 1..29: note = Probe
  source 1..29: mol_type = other DNA
gctatcgggcccataccccgaaaatgttg

SEQ ID NO: 54219 - DNA, 30 bp, synthetic construct; identical to SEQ ID NO: 6264
  misc_feature 1..30: note = Probe
  source 1..30: mol_type = other DNA

SEQ ID NO: 54220 - DNA, 31 bp, synthetic construct; identical to SEQ ID NO: 6265
  misc_feature 1..31: note = Probe
  source 1..31: mol_type = other DNA

SEQ ID NO: 54221 - DNA, 24 bp, synthetic construct
  misc_feature 1..24: note = Probe
  source 1..24: mol_type = other DNA
gctcacaagaactgctaactcatg

SEQ ID NO: 54222 - DNA, 30 bp, synthetic construct
  misc_feature 1..30: note = Probe
  source 1..30: mol_type = other DNA
gctcacaagaactgctaactcatgccccca

SEQ ID NO: 54223 - DNA, 50 bp, synthetic construct; identical to SEQ ID NO: 1205
  misc_feature 1..50: note = Probe
  source 1..50: mol_type = other DNA

SEQ ID NO: 54224 - DNA, 24 bp, synthetic construct
  misc_feature 1..24: note = Probe
  source 1..24: mol_type = other DNA
gctcacatcaccccataaacaaat

SEQ ID NO: 54225 - DNA, 30 bp, synthetic construct; identical to SEQ ID NO: 1206
  misc_feature 1..30: note = Probe
  source 1..30: mol_type = other DNA

SEQ ID NO: 54226 - DNA, 50 bp, synthetic construct; identical to SEQ ID NO: 6286
  misc_feature 1..50: note = Probe
  source 1..50: mol_type = other DNA

SEQ ID NO: 54227 - DNA, 23 bp, synthetic construct
  misc_feature 1..23: note = Probe
  source 1..23: mol_type = other DNA
gctcgaagatatatgtatatatc

SEQ ID NO: 54228 - DNA, 30 bp, synthetic construct; identical to SEQ ID NO: 21297
  misc_feature 1..30: note = Probe
  source 1..30: mol_type = other DNA

SEQ ID NO: 54229 - DNA, 16 bp, synthetic construct
  misc_feature 1..16: note = Probe
  source 1..16: mol_type = other DNA
gctctcaccgccgcgg

SEQ ID NO: 54230 - DNA, 23 bp, synthetic construct
  misc_feature 1..23: note = Probe
  source 1..23: mol_type = other DNA
gctctcaccgccgcggcccgggt

SEQ ID NO: 54231 - DNA, 24 bp, synthetic construct
  misc_feature 1..24: note = Probe
  source 1..24: mol_type = other DNA
gctgataacaccaaggtcgcgggc

SEQ ID NO: 54232 - DNA, 25 bp, synthetic construct
  misc_feature 1..25: note = Probe
  source 1..25: mol_type = other DNA
gctggtgtagtggtatcatgcaaga

SEQ ID NO: 54233 - DNA, 26 bp, synthetic construct
  misc_feature 1..26: note = Probe
  source 1..26: mol_type = other DNA
gctgttaactaagtgtttgtgggttt

SEQ ID NO: 54234 - DNA, 39 bp, synthetic construct
  misc_feature 1..39: note = Probe
  source 1..39: mol_type = other DNA
gctgttaactaagtgtttgtgggtttaagtcccattggt

SEQ ID NO: 54235 - DNA, 46 bp, synthetic construct; identical to SEQ ID NO: 6302
  misc_feature 1..46: note = Probe
  source 1..46: mol_type = other DNA

SEQ ID NO: 54236 - DNA, 24 bp, synthetic construct
  misc_feature 1..24: note = Probe
  source 1..24: mol_type = other DNA
gcttaaacccccttatttctagga

SEQ ID NO: 54237 - DNA, 44 bp, synthetic construct
  misc_feature 1..44: note = Probe
  source 1..44: mol_type = other DNA
gcttagctgttaactaagtgtttgtgggtttaagtcccattggt

SEQ ID NO: 54238 - DNA, 24 bp, synthetic construct
  misc_feature 1..24: note = Probe
  source 1..24: mol_type = other DNA
gcttcaaacctgccggggcttctc

SEQ ID NO: 54239 - DNA, 23 bp, synthetic construct
  misc_feature 1..23: note = Probe
  source 1..23: mol_type = other DNA
gcttctgtagtgtagtggttatc

SEQ ID NO: 54240 - DNA, 28 bp, synthetic construct
  misc_feature 1..28: note = Probe
  source 1..28: mol_type = other DNA
gcttctgtagtgtagtggttatcacgtt

SEQ ID NO: 54241 - DNA, 31 bp, synthetic construct; identical to SEQ ID NO: 1213
  misc_feature 1..31: note = Probe
  source 1..31: mol_type = other DNA

SEQ ID NO: 54242 - DNA, 32 bp, synthetic construct; identical to SEQ ID NO: 1214
  misc_feature 1..32: note = Probe
  source 1..32: mol_type = other DNA

SEQ ID NO: 54243 - DNA, 33 bp, synthetic construct; identical to SEQ ID NO: 1215
  misc_feature 1..33: note = Probe
  source 1..33: mol_type = other DNA

SEQ ID NO: 54244 - DNA, 35 bp, synthetic construct; identical to SEQ ID NO: 1217
  misc_feature 1..35: note = Probe
  source 1..35: mol_type = other DNA

SEQ ID NO: 54245 - DNA, 36 bp, synthetic construct; identical to SEQ ID NO: 1218
  misc_feature 1..36: note = Probe
  source 1..36: mol_type = other DNA

SEQ ID NO: 54246 - DNA, 38 bp, synthetic construct
  misc_feature 1..38: note = Probe
  source 1..38: mol_type = other DNA
gcttctgtagtgtagtggttatcacgttcgcctcacac

SEQ ID NO: 54247 - DNA, 42 bp, synthetic construct
  misc_feature 1..42: note = Probe
  source 1..42: mol_type = other DNA
gcttctgtagtgtagtggttatcacgttcgcctcacacgcga

SEQ ID NO: 54248 - DNA, 44 bp, synthetic construct
  misc_feature 1..44: note = Probe
  source 1..44: mol_type = other DNA
gcttctgtagtgtagtggttatcacgttcgcctcacacgcgaaa

SEQ ID NO: 54249 - DNA, 45 bp, synthetic construct
  misc_feature 1..45: note = Probe
  source 1..45: mol_type = other DNA
gcttctgtagtgtagtggttatcacgttcgcctcacacgcgaaag

SEQ ID NO: 54250 - DNA, 49 bp, synthetic construct
  misc_feature 1..49: note = Probe
  source 1..49: mol_type = other DNA
gcttctgtagtgtagtggttatcacgttcgcctcacacgcgaaaggtcc

SEQ ID NO: 54251 - DNA, 27 bp, synthetic construct
  misc_feature 1..27: note = Probe
  source 1..27: mol_type = other DNA
gctttggggggttcgattccttccttt

SEQ ID NO: 54252 - DNA, 44 bp, synthetic construct
  misc_feature 1..44: note = Probe
  source 1..44: mol_type = other DNA
gctttgggtgctaatggtggagttaaagactttttctctgattt

SEQ ID NO: 54253 - DNA, 45 bp, synthetic construct; identical to SEQ ID NO: 6343
  misc_feature 1..45: note = Probe
  source 1..45: mol_type = other DNA

SEQ ID NO: 54254 - DNA, 34 bp, synthetic construct; identical to SEQ ID NO: 6355
  misc_feature 1..34: note = Probe
  source 1..34: mol_type = other DNA

SEQ ID NO: 54255 - DNA, 26 bp, synthetic construct
  misc_feature 1..26: note = Probe
  source 1..26: mol_type = other DNA
ggagatgaaaacctttttccaaggac

SEQ ID NO: 54256 - DNA, 27 bp, synthetic construct
  misc_feature 1..27: note = Probe
  source 1..27: mol_type = other DNA
ggagatgaaaacctttttccaaggaca

SEQ ID NO: 54257 - DNA, 29 bp, synthetic construct
  misc_feature 1..29: note = Probe
  source 1..29: mol_type = other DNA
ggagatgaaaacctttttccaaggacaaa

SEQ ID NO: 54258 - DNA, 30 bp, synthetic construct; identical to SEQ ID NO: 6362
  misc_feature 1..30: note = Probe
  source 1..30: mol_type = other DNA

SEQ ID NO: 54259 - DNA, 31 bp, synthetic construct; identical to SEQ ID NO: 6363
  misc_feature 1..31: note = Probe
  source 1..31: mol_type = other DNA

SEQ ID NO: 54260 - DNA, 26 bp, synthetic construct
  misc_feature 1..26: note = Probe
  source 1..26: mol_type = other DNA
ggagatttcaacttaacttgaccgct

SEQ ID NO: 54261 - DNA, 32 bp, synthetic construct; identical to SEQ ID NO: 6374
  misc_feature 1..32: note = Probe
  source 1..32: mol_type = other DNA

SEQ ID NO: 54262 - DNA, 33 bp, synthetic construct; identical to SEQ ID NO: 6375
  misc_feature 1..33: note = Probe
  source 1..33: mol_type = other DNA

SEQ ID NO: 54263 - DNA, 26 bp, synthetic construct
  misc_feature 1..26: note = Probe
  source 1..26: mol_type = other DNA
ggagttaaagactttttctctgattt

SEQ ID NO: 54264 - DNA, 25 bp, synthetic construct
  misc_feature 1..25: note = Probe
  source 1..25: mol_type = other DNA
ggataaggcattggcctcctaagcc

SEQ ID NO: 54265 - DNA, 22 bp, synthetic construct
  misc_feature 1..22: note = Probe
  source 1..22: mol_type = other DNA
ggatagctcagtcggtagagca

SEQ ID NO: 54266 - DNA, 28 bp, synthetic construct
  misc_feature 1..28: note = Probe
  source 1..28: mol_type = other DNA
ggatgtagctcagtggtagagcgcatgc

SEQ ID NO: 54267 - DNA, 19 bp, synthetic construct
  misc_feature 1..19: note = Probe
  source 1..19: mol_type = other DNA
ggattcctggttttcaccc

SEQ ID NO: 54268 - DNA, 23 bp, synthetic construct
  misc_feature 1..23: note = Probe
  source 1..23: mol_type = other DNA
ggattcctggttttcacccaggc

SEQ ID NO: 54269 - DNA, 27 bp, synthetic construct
  misc_feature 1..27: note = Probe
  source 1..27: mol_type = other DNA
ggattcctggttttcacccaggcggcc

SEQ ID NO: 54270 - DNA, 29 bp, synthetic construct
  misc_feature 1..29: note = Probe
  source 1..29: mol_type = other DNA
ggattcctggttttcacccaggcggcccg

SEQ ID NO: 54271 - DNA, 29 bp, synthetic construct
  misc_feature 1..29: note = Probe
  source 1..29: mol_type = other DNA
ggattcctggttttcacccaggtggcccg

SEQ ID NO: 54272 - DNA, 17 bp, synthetic construct
  misc_feature 1..17: note = Probe
  source 1..17: mol_type = other DNA
ggattcggcgctctcac

SEQ ID NO: 54273 - DNA, 26 bp, synthetic construct
  misc_feature 1..26: note = Probe
  source 1..26: mol_type = other DNA
ggattcggcgctctcaccgccgcggc

SEQ ID NO: 54274 - DNA, 28 bp, synthetic construct
  misc_feature 1..28: note = Probe
  source 1..28: mol_type = other DNA
ggattcggcgctttcaccgccgcggccc

SEQ ID NO: 54275 - DNA, 23 bp, synthetic construct
  misc_feature 1..23: note = Probe
  source 1..23: mol_type = other DNA
ggattgtgggttcgagtcccatc

SEQ ID NO: 54276 - DNA, 50 bp, synthetic construct; identical to SEQ ID NO: 6392
  misc_feature 1..50: note = Probe
  source 1..50: mol_type = other DNA

SEQ ID NO: 54277 - DNA, 21 bp, synthetic construct
  misc_feature 1..21: note = Probe
  source 1..21: mol_type = other DNA
ggcccataacccagaggtcga

SEQ ID NO: 54278 - DNA, 24 bp, synthetic construct
  misc_feature 1..24: note = Probe
  source 1..24: mol_type = other DNA
ggcccataacccagaggtcgatgg

SEQ ID NO: 54279 - DNA, 50 bp, synthetic construct; identical to SEQ ID NO: 6398
  misc_feature 1..50: note = Probe
  source 1..50: mol_type = other DNA

SEQ ID NO: 54280 - DNA, 46 bp, synthetic construct; identical to SEQ ID NO: 40752
  misc_feature 1..46: note = Probe
  source 1..46: mol_type = other DNA

SEQ ID NO: 54281 - DNA, 30 bp, synthetic construct; identical to SEQ ID NO: 6411
  misc_feature 1..30: note = Probe
  source 1..30: mol_type = other DNA

SEQ ID NO: 54282 - DNA, 31 bp, synthetic construct; identical to SEQ ID NO: 6412
  misc_feature 1..31: note = Probe
  source 1..31: mol_type = other DNA

SEQ ID NO: 54283 - DNA, 32 bp, synthetic construct; identical to SEQ ID NO: 6413
  misc_feature 1..32: note = Probe
  source 1..32: mol_type = other DNA

SEQ ID NO: 54284 - DNA, 33 bp, synthetic construct; identical to SEQ ID NO: 6414
  misc_feature 1..33: note = Probe
  source 1..33: mol_type = other DNA

SEQ ID NO: 54285 - DNA, 34 bp, synthetic construct; identical to SEQ ID NO: 6415
  misc_feature 1..34: note = Probe
  source 1..34: mol_type = other DNA

SEQ ID NO: 54286 - DNA, 39 bp, synthetic construct; identical to SEQ ID NO: 6419
  misc_feature 1..39: note = Probe
  source 1..39: mol_type = other DNA

SEQ ID NO: 54287 - DNA, 45 bp, synthetic construct; identical to SEQ ID NO: 6422
  misc_feature 1..45: note = Probe
  source 1..45: mol_type = other DNA

SEQ ID NO: 54288 - DNA, 23 bp, synthetic construct
  misc_feature 1..23: note = Probe
  source 1..23: mol_type = other DNA
ggccccatggtgtaatggttagc

SEQ ID NO: 54289 - DNA, 50 bp, synthetic construct; identical to SEQ ID NO: 6427
  misc_feature 1..50: note = Probe
  source 1..50: mol_type = other DNA

SEQ ID NO: 54290 - DNA, 17 bp, synthetic construct
  misc_feature 1..17: note = Probe
  source 1..17: mol_type = other DNA
ggccgcgtggcctaatg

SEQ ID NO: 54291 - DNA, 18 bp, synthetic construct
  misc_feature 1..18: note = Probe
  source 1..18: mol_type = other DNA
ggccgcgtggcctaatgg

SEQ ID NO: 54292 - DNA, 16 bp, synthetic construct
  misc_feature 1..16: note = Probe
  source 1..16: mol_type = other DNA
ggccggttagctcagt

SEQ ID NO: 54293 - DNA, 18 bp, synthetic construct
  misc_feature 1..18: note = Probe
  source 1..18: mol_type = other DNA
ggccggttagctcagttg

SEQ ID NO: 54294 - DNA, 19 bp, synthetic construct
  misc_feature 1..19: note = Probe
  source 1..19: mol_type = other DNA
ggccggttagctcagttgg

SEQ ID NO: 54295 - DNA, 26 bp, synthetic construct
  misc_feature 1..26: note = Probe
  source 1..26: mol_type = other DNA
ggcctcctaagccagggattgtgggt

SEQ ID NO: 54296 - DNA, 21 bp, synthetic construct
  misc_feature 1..21: note = Probe
  source 1..21: mol_type = other DNA
ggcctcgtggcgcaacggtag

SEQ ID NO: 54297 - DNA, 22 bp, synthetic construct
  misc_feature 1..22: note = Probe
  source 1..22: mol_type = other DNA
ggcctcgtggcgcaacggtagc

SEQ ID NO: 54298 - DNA, 20 bp, synthetic construct
  misc_feature 1..20: note = Probe
  source 1..20: mol_type = other DNA
ggcgtgattcataccttttt

SEQ ID NO: 54299 - DNA, 21 bp, synthetic construct
  misc_feature 1..21: note = Probe
  source 1..21: mol_type = other DNA
ggcgtgattcatacctttttc

SEQ ID NO: 54300 - DNA, 24 bp, synthetic construct
  misc_feature 1..24: note = Probe
  source 1..24: mol_type = other DNA
ggctaaatcctatatatcttaatg

SEQ ID NO: 54301 - DNA, 22 bp, synthetic construct
  misc_feature 1..22: note = Probe
  source 1..22: mol_type = other DNA
ggctagctcagtcggtagagca

SEQ ID NO: 54302 - DNA, 24 bp, synthetic construct
  misc_feature 1..24: note = Probe
  source 1..24: mol_type = other DNA
ggctagctcagtcggtagagcatg

SEQ ID NO: 54303 - DNA, 30 bp, synthetic construct; identical to SEQ ID NO: 1285
  misc_feature 1..30: note = Probe
  source 1..30: mol_type = other DNA

SEQ ID NO: 54304 - DNA, 26 bp, synthetic construct
  misc_feature 1..26: note = Probe
  source 1..26: mol_type = other DNA
ggctagctcagtcggtagagcatggg

SEQ ID NO: 54305 - DNA, 45 bp, synthetic construct
  misc_feature 1..45: note = Probe
  source 1..45: mol_type = other DNA
ggctagctcagtcggtagagcatgggactcttaatcccagggtcg

SEQ ID NO: 54306 - DNA, 50 bp, synthetic construct; identical to SEQ ID NO: 6462
  misc_feature 1..50: note = Probe
  source 1..50: mol_type = other DNA

SEQ ID NO: 54307 - DNA, 25 bp, synthetic construct
  misc_feature 1..25: note = Probe
  source 1..25: mol_type = other DNA
ggctcacatcaccccataaacaaat

SEQ ID NO: 54308 - DNA, 27 bp, synthetic construct
  misc_feature 1..27: note = Probe
  source 1..27: mol_type = other DNA
ggctccgtggcgcaatggatagcgcat

SEQ ID NO: 54309 - DNA, 29 bp, synthetic construct
  misc_feature 1..29: note = Probe
  source 1..29: mol_type = other DNA
ggctccgtggcgcaatggatagcgcattg

SEQ ID NO: 54310 - DNA, 31 bp, synthetic construct; identical to SEQ ID NO: 21644
  misc_feature 1..31: note = Probe
  source 1..31: mol_type = other DNA

SEQ ID NO: 54311 - DNA, 32 bp, synthetic construct; identical to SEQ ID NO: 1304
  misc_feature 1..32: note = Probe
  source 1..32: mol_type = other DNA

SEQ ID NO: 54312 - DNA, 33 bp, synthetic construct; identical to SEQ ID NO: 6492
  misc_feature 1..33: note = Probe
  source 1..33: mol_type = other DNA

SEQ ID NO: 54313 - DNA, 23 bp, synthetic construct
  misc_feature 1..23: note = Probe
  source 1..23: mol_type = other DNA
ggctcgaaggacttcgtctgtaa

SEQ ID NO: 54314 - DNA, 24 bp, synthetic construct
  misc_feature 1..24: note = Probe
  source 1..24: mol_type = other DNA
ggctcgaaggacttcgtctgtaat

SEQ ID NO: 54315 - DNA, 25 bp, synthetic construct
  misc_feature 1..25: note = Probe
  source 1..25: mol_type = other DNA
ggctcgaaggacttcgtctgtaatt

SEQ ID NO: 54316 - DNA, 26 bp, synthetic construct
  misc_feature 1..26: note = Probe
  source 1..26: mol_type = other DNA
ggctcgttggtctaggggtatgattc

SEQ ID NO: 54317 - DNA, 27 bp, synthetic construct
  misc_feature 1..27: note = Probe
  source 1..27: mol_type = other DNA
ggctcgttggtctaggggtatgattct

SEQ ID NO: 54318 - DNA, 29 bp, synthetic construct
  misc_feature 1..29: note = Probe
  source 1..29: mol_type = other DNA
ggctcgttggtctaggggtatgattctcg

SEQ ID NO: 54319 - DNA, 30 bp, synthetic construct; identical to SEQ ID NO: 6496
  misc_feature 1..30: note = Probe
  source 1..30: mol_type = other DNA

SEQ ID NO: 54320 - DNA, 31 bp, synthetic construct; identical to SEQ ID NO: 6497
  misc_feature 1..31: note = Probe
  source 1..31: mol_type = other DNA

SEQ ID NO: 54321 - DNA, 30 bp, synthetic construct; identical to SEQ ID NO: 8665
  misc_feature 1..30: note = Probe
  source 1..30: mol_type = other DNA

SEQ ID NO: 54322 - DNA, 31 bp, synthetic construct; identical to SEQ ID NO: 6502
  misc_feature 1..31: note = Probe
  source 1..31: mol_type = other DNA

SEQ ID NO: 54323 - DNA, 50 bp, synthetic construct
  misc_feature 1..50: note = Probe
  source 1..50: mol_type = other DNA
ggctctgtggcgcaatggatagcgcattggacttctagcctaaatcaaga

SEQ ID NO: 54324 - DNA, 26 bp, synthetic construct
  misc_feature 1..26: note = Probe
  source 1..26: mol_type = other DNA
gggagaccggggttcgattccccgac

SEQ ID NO: 54325 - DNA, 31 bp, synthetic construct; identical to SEQ ID NO: 6530
  misc_feature 1..31: note = Probe
  source 1..31: mol_type = other DNA

SEQ ID NO: 54326 - DNA, 29 bp, synthetic construct
  misc_feature 1..29: note = Probe
  source 1..29: mol_type = other DNA
gggatgtagctcagtggtagagcgcatgc

SEQ ID NO: 54327 - DNA, 29 bp, synthetic construct
  misc_feature 1..29: note = Probe
  source 1..29: mol_type = other DNA
gggattagctcaaatggtagagcgctcgc

SEQ ID NO: 54328 - DNA, 24 bp, synthetic construct
  misc_feature 1..24: note = Probe
  source 1..24: mol_type = other DNA
gggattgtgggttcgagtcccatc

SEQ ID NO: 54329 - DNA, 25 bp, synthetic construct
  misc_feature 1..25: note = Probe
  source 1..25: mol_type = other DNA
gggattgtgggttcgagtcccatct

SEQ ID NO: 54330 - DNA, 21 bp, synthetic construct
  misc_feature 1..21: note = Probe
  source 1..21: mol_type = other DNA
gggccagtggcgcaatggata

SEQ ID NO: 54331 - DNA, 23 bp, synthetic construct
  misc_feature 1..23: note = Probe
  source 1..23: mol_type = other DNA
gggccagtggcgcaatggataac

SEQ ID NO: 54332 - DNA, 25 bp, synthetic construct
  misc_feature 1..25: note = Probe
  source 1..25: mol_type = other DNA
gggccagtggcgcaatggataacgc

SEQ ID NO: 54333 - DNA, 22 bp, synthetic construct
  misc_feature 1..22: note = Probe
  source 1..22: mol_type = other DNA
gggcccataacccagaggtcga

SEQ ID NO: 54334 - DNA, 23 bp, synthetic construct
  misc_feature 1..23: note = Probe
  source 1..23: mol_type = other DNA
gggcccataacccagaggtcgat

SEQ ID NO: 54335 - DNA, 25 bp, synthetic construct
  misc_feature 1..25: note = Probe
  source 1..25: mol_type = other DNA
gggcccataacccagaggtcgatgg

SEQ ID NO: 54336 - DNA, 48 bp, synthetic construct
  misc_feature 1..48: note = Probe
  source 1..48: mol_type = other DNA
gggcccataacccagaggtcgatggatcgaaaccatcctctgctaggg

SEQ ID NO: 54337 - DNA, 49 bp, synthetic construct
  misc_feature 1..49: note = Probe
  source 1..49: mol_type = other DNA
gggcccataacccagaggtcgatggatcgaaaccatcctctgctaggga

SEQ ID NO: 54338 - DNA, 50 bp, synthetic construct; identical to SEQ ID NO: 49179
  misc_feature 1..50: note = Probe
  source 1..50: mol_type = other DNA

SEQ ID NO: 54339 - DNA, 49 bp, synthetic construct; identical to SEQ ID NO: 49181
  misc_feature 1..49: note = Probe
  source 1..49: mol_type = other DNA

SEQ ID NO: 54340 - DNA, 50 bp, synthetic construct; identical to SEQ ID NO: 6540
  misc_feature 1..50: note = Probe
  source 1..50: mol_type = other DNA

SEQ ID NO: 54341 - DNA, 49 bp, synthetic construct; identical to SEQ ID NO: 49183
  misc_feature 1..49: note = Probe
  source 1..49: mol_type = other DNA

SEQ ID NO: 54342 - DNA, 48 bp, synthetic construct
  misc_feature 1..48: note = Probe
  source 1..48: mol_type = other DNA
gggcccataacccagaggtcgatggatcgaaaccatcctctgctattt

SEQ ID NO: 54343 - DNA, 49 bp, synthetic construct
  misc_feature 1..49: note = Probe
  source 1..49: mol_type = other DNA
gggcccataacccagaggtcgatggatcgaaaccatcctctgctatttt

SEQ ID NO: 54344 - DNA, 50 bp, synthetic construct; identical to SEQ ID NO: 49184
  misc_feature 1..50: note = Probe
  source 1..50: mol_type = other DNA

SEQ ID NO: 54345 - DNA, 46 bp, synthetic construct; identical to SEQ ID NO: 6558
  misc_feature 1..46: note = Probe
  source 1..46: mol_type = other DNA

SEQ ID NO: 54346 - DNA, 26 bp, synthetic construct
  misc_feature 1..26: note = Probe
  source 1..26: mol_type = other DNA
gggctcacatcaccccataaacaaat

SEQ ID NO: 54347 - DNA, 18 bp, synthetic construct
  misc_feature 1..18: note = Probe
  source 1..18: mol_type = other DNA
ggggatgtagctcagtgg

SEQ ID NO: 54348 - DNA, 22 bp, synthetic construct
  misc_feature 1..22: note = Probe
  source 1..22: mol_type = other DNA
ggggatgtagctcagtggtaga

SEQ ID NO: 54349 - DNA, 24 bp, synthetic construct
  misc_feature 1..24: note = Probe
  source 1..24: mol_type = other DNA
ggggatgtagctcagtggtagagc

SEQ ID NO: 54350 - DNA, 31 bp, synthetic construct; identical to SEQ ID NO: 1336
  misc_feature 1..31: note = Probe
  source 1..31: mol_type = other DNA

SEQ ID NO: 54351 - DNA, 16 bp, synthetic construct
  misc_feature 1..16: note = Probe
  source 1..16: mol_type = other DNA
gggggattagctcaaa

SEQ ID NO: 54352 - DNA, 21 bp, synthetic construct
  misc_feature 1..21: note = Probe
  source 1..21: mol_type = other DNA
gggggattagctcaaatggta

SEQ ID NO: 54353 - DNA, 22 bp, synthetic construct
  misc_feature 1..22: note = Probe
  source 1..22: mol_type = other DNA
gggggattagctcaaatggtag

SEQ ID NO: 54354 - DNA, 23 bp, synthetic construct
  misc_feature 1..23: note = Probe
  source 1..23: mol_type = other DNA
gggggattagctcaaatggtaga

SEQ ID NO: 54355 - DNA, 30 bp, synthetic construct; identical to SEQ ID NO: 6598
  misc_feature 1..30: note = Probe
  source 1..30: mol_type = other DNA

SEQ ID NO: 54356 - DNA, 32 bp, synthetic construct; identical to SEQ ID NO: 6600
  misc_feature 1..32: note = Probe
  source 1..32: mol_type = other DNA

SEQ ID NO: 54357 - DNA, 34 bp, synthetic construct; identical to SEQ ID NO: 6602
  misc_feature 1..34: note = Probe
  source 1..34: mol_type = other DNA

SEQ ID NO: 54358 - DNA, 30 bp, synthetic construct; identical to SEQ ID NO: 21919
  misc_feature 1..30: note = Probe
  source 1..30: mol_type = other DNA

SEQ ID NO: 54359 - DNA, 31 bp, synthetic construct; identical to SEQ ID NO: 1368
  misc_feature 1..31: note = Probe
  source 1..31: mol_type = other DNA

SEQ ID NO: 54360 - DNA, 16 bp, synthetic construct
  misc_feature 1..16: note = Probe
  source 1..16: mol_type = other DNA
ggggtatgattctcgc

SEQ ID NO: 54361 - DNA, 17 bp, synthetic construct
  misc_feature 1..17: note = Probe
  source 1..17: mol_type = other DNA
ggggtatgattctcgct

SEQ ID NO: 54362 - DNA, 29 bp, synthetic construct
  misc_feature 1..29: note = Probe
  source 1..29: mol_type = other DNA
ggggtgtagctcagtggtagagcgcgtgc

SEQ ID NO: 54363 - DNA, 16 bp, synthetic construct
  misc_feature 1..16: note = Probe
  source 1..16: mol_type = other DNA
gggtatgattctcgct

SEQ ID NO: 54364 - DNA, 33 bp, synthetic construct; identical to SEQ ID NO: 6649
  misc_feature 1..33: note = Probe
  source 1..33: mol_type = other DNA

SEQ ID NO: 54365 - DNA, 34 bp, synthetic construct; identical to SEQ ID NO: 21958
  misc_feature 1..34: note = Probe
  source 1..34: mol_type = other DNA

SEQ ID NO: 54366 - DNA, 33 bp, synthetic construct; identical to SEQ ID NO: 6650
  misc_feature 1..33: note = Probe
  source 1..33: mol_type = other DNA

SEQ ID NO: 54367 - DNA, 34 bp, synthetic construct; identical to SEQ ID NO: 13881
  misc_feature 1..34: note = Probe
  source 1..34: mol_type = other DNA

SEQ ID NO: 54368 - DNA, 39 bp, synthetic construct
  misc_feature 1..39: note = Probe
  source 1..39: mol_type = other DNA
gggtatgattctcgcttcgggtgcgagaggtcccgggtt

SEQ ID NO: 54369 - DNA, 33 bp, synthetic construct; identical to SEQ ID NO: 6651
  misc_feature 1..33: note = Probe
  source 1..33: mol_type = other DNA

SEQ ID NO: 54370 - DNA, 34 bp, synthetic construct; identical to SEQ ID NO: 21964
  misc_feature 1..34: note = Probe
  source 1..34: mol_type = other DNA

SEQ ID NO: 54371 - DNA, 39 bp, synthetic construct; identical to SEQ ID NO: 21968
  misc_feature 1..39: note = Probe
  source 1..39: mol_type = other DNA

SEQ ID NO: 54372 - DNA, 34 bp, synthetic construct; identical to SEQ ID NO: 21969
  misc_feature 1..34: note = Probe
  source 1..34: mol_type = other DNA

SEQ ID NO: 54373 - DNA, 39 bp, synthetic construct; identical to SEQ ID NO: 6655
  misc_feature 1..39: note = Probe
  source 1..39: mol_type = other DNA

SEQ ID NO: 54374 - DNA, 28 bp, synthetic construct
  misc_feature 1..28: note = Probe
  source 1..28: mol_type = other DNA
gggtgtagctcagtggtagagcgcgtgc

SEQ ID NO: 54375 - DNA, 26 bp, synthetic construct
  misc_feature 1..26: note = Probe
  source 1..26: mol_type = other DNA
gggttcgattctcatagtcctagaaa

SEQ ID NO: 54376 - DNA, 25 bp, synthetic construct
  misc_feature 1..25: note = Probe
  source 1..25: mol_type = other DNA
ggtaaaatggctgagtgaagcattg

SEQ ID NO: 54377 - DNA, 31 bp, synthetic construct; identical to SEQ ID NO: 6689
  misc_feature 1..31: note = Probe
  source 1..31: mol_type = other DNA

SEQ ID NO: 54378 - DNA, 32 bp, synthetic construct; identical to SEQ ID NO: 6690
  misc_feature 1..32: note = Probe
  source 1..32: mol_type = other DNA

SEQ ID NO: 54379 - DNA, 33 bp, synthetic construct; identical to SEQ ID NO: 6691
  misc_feature 1..33: note = Probe
  source 1..33: mol_type = other DNA

SEQ ID NO: 54380 - DNA, 34 bp, synthetic construct; identical to SEQ ID NO: 6692
  misc_feature 1..34: note = Probe
  source 1..34: mol_type = other DNA

SEQ ID NO: 54381 - DNA, 35 bp, synthetic construct; identical to SEQ ID NO: 6693
  misc_feature 1..35: note = Probe
  source 1..35: mol_type = other DNA

SEQ ID NO: 54382 - DNA, 36 bp, synthetic construct; identical to SEQ ID NO: 6694
  misc_feature 1..36: note = Probe
  source 1..36: mol_type = other DNA

SEQ ID NO: 54383 - DNA, 37 bp, synthetic construct; identical to SEQ ID NO: 6695
  misc_feature 1..37: note = Probe
  source 1..37: mol_type = other DNA

SEQ ID NO: 54384 - DNA, 38 bp, synthetic construct; identical to SEQ ID NO: 6696
  misc_feature 1..38: note = Probe
  source 1..38: mol_type = other DNA

SEQ ID NO: 54385 - DNA, 33 bp, synthetic construct; identical to SEQ ID NO: 13887
  misc_feature 1..33: note = Probe
  source 1..33: mol_type = other DNA

SEQ ID NO: 54386 - DNA, 50 bp, synthetic construct; identical to SEQ ID NO: 6698
  misc_feature 1..50: note = Probe
  source 1..50: mol_type = other DNA

SEQ ID NO: 54387 - DNA, 16 bp, synthetic construct
  misc_feature 1..16: note = Probe
  source 1..16: mol_type = other DNA
ggtagaattctcgcct

SEQ ID NO: 54388 - DNA, 17 bp, synthetic construct
  misc_feature 1..17: note = Probe
  source 1..17: mol_type = other DNA
ggtagaattctcgcctg

SEQ ID NO: 54389 - DNA, 18 bp, synthetic construct
  misc_feature 1..18: note = Probe
  source 1..18: mol_type = other DNA
ggtagaattctcgcctgc

SEQ ID NO: 54390 - DNA, 19 bp, synthetic construct
  misc_feature 1..19: note = Probe
  source 1..19: mol_type = other DNA
ggtagaattctcgcctgcc

SEQ ID NO: 54391 - DNA, 22 bp, synthetic construct
  misc_feature 1..22: note = Probe
  source 1..22: mol_type = other DNA
ggtagaattctcgcctgccacg

SEQ ID NO: 54392 - DNA, 23 bp, synthetic construct
  misc_feature 1..23: note = Probe
  source 1..23: mol_type = other DNA
ggtagaattctcgcctgccacgc

SEQ ID NO: 54393 - DNA, 33 bp, synthetic construct; identical to SEQ ID NO: 22065
  misc_feature 1..33: note = Probe
  source 1..33: mol_type = other DNA

SEQ ID NO: 54394 - DNA, 37 bp, synthetic construct; identical to SEQ ID NO: 22066
  misc_feature 1..37: note = Probe
  source 1..37: mol_type = other DNA

SEQ ID NO: 54395 - DNA, 17 bp, synthetic construct
  misc_feature 1..17: note = Probe
  source 1..17: mol_type = other DNA
ggtagagcatgggactc

SEQ ID NO: 54396 - DNA, 32 bp, synthetic construct; identical to SEQ ID NO: 6706
  misc_feature 1..32: note = Probe
  source 1..32: mol_type = other DNA

SEQ ID NO: 54397 - DNA, 37 bp, synthetic construct; identical to SEQ ID NO: 13895
  misc_feature 1..37: note = Probe
  source 1..37: mol_type = other DNA

SEQ ID NO: 54398 - DNA, 18 bp, synthetic construct
  misc_feature 1..18: note = Probe
  source 1..18: mol_type = other DNA
ggtagcgtggccgagcgg

SEQ ID NO: 54399 - DNA, 19 bp, synthetic construct
  misc_feature 1..19: note = Probe
  source 1..19: mol_type = other DNA
ggtagcgtggccgagcggt

SEQ ID NO: 54400 - DNA, 23 bp, synthetic construct
  misc_feature 1..23: note = Probe
  source 1..23: mol_type = other DNA
ggtagcgtggccgagcggtctaa

SEQ ID NO: 54401 - DNA, 18 bp, synthetic construct
  misc_feature 1..18: note = Probe
  source 1..18: mol_type = other DNA
ggtagcgtggccgagtgg

SEQ ID NO: 54402 - DNA, 22 bp, synthetic construct
  misc_feature 1..22: note = Probe
  source 1..22: mol_type = other DNA
ggtagcgtggccgagtggtcta

SEQ ID NO: 54403 - DNA, 29 bp, synthetic construct
  misc_feature 1..29: note = Probe
  source 1..29: mol_type = other DNA
ggtatcatgcaagattcccattcttgcga

SEQ ID NO: 54404 - DNA, 31 bp, synthetic construct
  misc_feature 1..31: note = Probe
  source 1..31: mol_type = other DNA
ggtatcatgcaagattcccattcttgcgacc

SEQ ID NO: 54405 - DNA, 37 bp, synthetic construct
  misc_feature 1..37: note = Probe
  source 1..37: mol_type = other DNA
ggtatcatgcaagattcccattcttgcgacccgggtt

SEQ ID NO: 54406 - DNA, 38 bp, synthetic construct
  misc_feature 1..38: note = Probe
  source 1..38: mol_type = other DNA
ggtatcatgcaagattcccattcttgcgacccgggttc

SEQ ID NO: 54407 - DNA, 32 bp, synthetic construct; identical to SEQ ID NO: 6725
  misc_feature 1..32: note = Probe
  source 1..32: mol_type = other DNA

SEQ ID NO: 54408 - DNA, 33 bp, synthetic construct; identical to SEQ ID NO: 6726
  misc_feature 1..33: note = Probe
  source 1..33: mol_type = other DNA

SEQ ID NO: 54409 - DNA, 37 bp, synthetic construct; identical to SEQ ID NO: 22109
  misc_feature 1..37: note = Probe
  source 1..37: mol_type = other DNA

SEQ ID NO: 54410 - DNA, 38 bp, synthetic construct; identical to SEQ ID NO: 22110
  misc_feature 1..38: note = Probe
  source 1..38: mol_type = other DNA

SEQ ID NO: 54411 - DNA, 40 bp, synthetic construct
  misc_feature 1..40: note = Probe
  source 1..40: mol_type = other DNA
ggtatgattctcgcttagggtgcgagaggtcccgggttca

SEQ ID NO: 54412 - DNA, 32 bp, synthetic construct; identical to SEQ ID NO: 6727
  misc_feature 1..32: note = Probe
  source 1..32: mol_type = other DNA

SEQ ID NO: 54413 - DNA, 33 bp, synthetic construct; identical to SEQ ID NO: 6728
  misc_feature 1..33: note = Probe
  source 1..33: mol_type = other DNA

SEQ ID NO: 54414 - DNA, 34 bp, synthetic construct
  misc_feature 1..34: note = Probe
  source 1..34: mol_type = other DNA
ggtatgattctcgcttcgggtgcgagaggtcccg

SEQ ID NO: 54415 - DNA, 37 bp, synthetic construct; identical to SEQ ID NO: 22112
  misc_feature 1..37: note = Probe
  source 1..37: mol_type = other DNA

SEQ ID NO: 54416 - DNA, 38 bp, synthetic construct; identical to SEQ ID NO: 22113
  misc_feature 1..38: note = Probe
  source 1..38: mol_type = other DNA

SEQ ID NO: 54417 - DNA, 40 bp, synthetic construct
  misc_feature 1..40: note = Probe
  source 1..40: mol_type = other DNA
ggtatgattctcgcttcgggtgcgagaggtcccgggttca

SEQ ID NO: 54418 - DNA, 32 bp, synthetic construct; identical to SEQ ID NO: 6729
  misc_feature 1..32: note = Probe
  source 1..32: mol_type = other DNA

SEQ ID NO: 54419 - DNA, 34 bp, synthetic construct; identical to SEQ ID NO: 22115
  misc_feature 1..34: note = Probe
  source 1..34: mol_type = other DNA

SEQ ID NO: 54420 - DNA, 37 bp, synthetic construct; identical to SEQ ID NO: 22117
  misc_feature 1..37: note = Probe
  source 1..37: mol_type = other DNA

SEQ ID NO: 54421 - DNA, 38 bp, synthetic construct; identical to SEQ ID NO: 22118
  misc_feature 1..38: note = Probe
  source 1..38: mol_type = other DNA

SEQ ID NO: 54422 - DNA, 40 bp, synthetic construct
  misc_feature 1..40: note = Probe
  source 1..40: mol_type = other DNA
ggtatgattctcgctttgggtgcgagaggtcccgggttca

SEQ ID NO: 54423 - DNA, 32 bp, synthetic construct; identical to SEQ ID NO: 6730
  misc_feature 1..32: note = Probe
  source 1..32: mol_type = other DNA

SEQ ID NO: 54424 - DNA, 33 bp, synthetic construct; identical to SEQ ID NO: 1408
  misc_feature 1..33: note = Probe
  source 1..33: mol_type = other DNA

SEQ ID NO: 54425 - DNA, 38 bp, synthetic construct
  misc_feature 1..38: note = Probe
  source 1..38: mol_type = other DNA
ggtatgattctcggtttgggtccgagaggtcccgggtt

SEQ ID NO: 54426 - DNA, 27 bp, synthetic construct
  misc_feature 1..27: note = Probe
  source 1..27: mol_type = other DNA
ggtcagctaaataagctatcgggccca

SEQ ID NO: 54427 - DNA, 28 bp, synthetic construct
  misc_feature 1..28: note = Probe
  source 1..28: mol_type = other DNA
ggtcagctaaataagctatcgggcccat

SEQ ID NO: 54428 - DNA, 29 bp, synthetic construct
  misc_feature 1..29: note = Probe
  source 1..29: mol_type = other DNA
ggtcagctaaataagctatcgggcccata

SEQ ID NO: 54429 - DNA, 30 bp, synthetic construct; identical to SEQ ID NO: 6735
  misc_feature 1..30: note = Probe
  source 1..30: mol_type = other DNA

SEQ ID NO: 54430 - DNA, 31 bp, synthetic construct; identical to SEQ ID NO: 6736
  misc_feature 1..31: note = Probe
  source 1..31: mol_type = other DNA

SEQ ID NO: 54431 - DNA, 39 bp, synthetic construct; identical to SEQ ID NO: 6740
  misc_feature 1..39: note = Probe
  source 1..39: mol_type = other DNA

SEQ ID NO: 54432 - DNA, 41 bp, synthetic construct; identical to SEQ ID NO: 6742
  misc_feature 1..41: note = Probe
  source 1..41: mol_type = other DNA

SEQ ID NO: 54433 - DNA, 42 bp, synthetic construct; identical to SEQ ID NO: 6743
  misc_feature 1..42: note = Probe
  source 1..42: mol_type = other DNA

SEQ ID NO: 54434 - DNA, 43 bp, synthetic construct; identical to SEQ ID NO: 6744
  misc_feature 1..43: note = Probe
  source 1..43: mol_type = other DNA

SEQ ID NO: 54435 - DNA, 44 bp, synthetic construct; identical to SEQ ID NO: 6745
  misc_feature 1..44: note = Probe
  source 1..44: mol_type = other DNA

SEQ ID NO: 54436 - DNA, 45 bp, synthetic construct; identical to SEQ ID NO: 6746
  misc_feature 1..45: note = Probe
  source 1..45: mol_type = other DNA

SEQ ID NO: 54437 - DNA, 22 bp, synthetic construct
  misc_feature 1..22: note = Probe
  source 1..22: mol_type = other DNA
ggtcatgggtggttgcgttttg

SEQ ID NO: 54438 - DNA, 23 bp, synthetic construct
  misc_feature 1..23: note = Probe
  source 1..23: mol_type = other DNA
ggtcatgggtggttgcgttttgg

SEQ ID NO: 54439 - DNA, 26 bp, synthetic construct
  misc_feature 1..26: note = Probe
  source 1..26: mol_type = other DNA
ggtcccatggtgtaatggttagcact

SEQ ID NO: 54440 - DNA, 27 bp, synthetic construct
  misc_feature 1..27: note = Probe
  source 1..27: mol_type = other DNA
ggtcccatggtgtaatggttagcactc

SEQ ID NO: 54441 - DNA, 29 bp, synthetic construct
  misc_feature 1..29: note = Probe
  source 1..29: mol_type = other DNA
ggtcccatggtgtaatggttagcactctg

SEQ ID NO: 54442 - DNA, 30 bp, synthetic construct; identical to SEQ ID NO: 8706
  misc_feature 1..30: note = Probe
  source 1..30: mol_type = other DNA

SEQ ID NO: 54443 - DNA, 31 bp, synthetic construct; identical to SEQ ID NO: 22145
  misc_feature 1..31: note = Probe
  source 1..31: mol_type = other DNA

SEQ ID NO: 54444 - DNA, 49 bp, synthetic construct
  misc_feature 1..49: note = Probe
  source 1..49: mol_type = other DNA
ggtcccatggtgtaatggttagcactctggactttgaatccagcgatcc

SEQ ID NO: 54445 - DNA, 31 bp, synthetic construct; identical to SEQ ID NO: 6765
  misc_feature 1..31: note = Probe
  source 1..31: mol_type = other DNA

SEQ ID NO: 54446 - DNA, 24 bp, synthetic construct
  misc_feature 1..24: note = Probe
  source 1..24: mol_type = other DNA
ggtctagtggttaggattcggcgc

SEQ ID NO: 54447 - DNA, 29 bp, synthetic construct
  misc_feature 1..29: note = Probe
  source 1..29: mol_type = other DNA
ggtctagtggttaggattcggcgctctca

SEQ ID NO: 54448 - DNA, 41 bp, synthetic construct; identical to SEQ ID NO: 22188
  misc_feature 1..41: note = Probe
  source 1..41: mol_type = other DNA

SEQ ID NO: 54449 - DNA, 26 bp, synthetic construct
  misc_feature 1..26: note = Probe
  source 1..26: mol_type = other DNA
ggtctcgtaaaccgaagatcacgggt

SEQ ID NO: 54450 - DNA, 16 bp, synthetic construct
  misc_feature 1..16: note = Probe
  source 1..16: mol_type = other DNA
ggtgagtatccccgcc

SEQ ID NO: 54451 - DNA, 19 bp, synthetic construct
  misc_feature 1..19: note = Probe
  source 1..19: mol_type = other DNA
ggtgagtatccccgcctgt

SEQ ID NO: 54452 - DNA, 22 bp, synthetic construct
  misc_feature 1..22: note = Probe
  source 1..22: mol_type = other DNA
ggtgagtatccccgcctgtcac

SEQ ID NO: 54453 - DNA, 32 bp, synthetic construct; identical to SEQ ID NO: 22198
  misc_feature 1..32: note = Probe
  source 1..32: mol_type = other DNA

SEQ ID NO: 54454 - DNA, 33 bp, synthetic construct; identical to SEQ ID NO: 22199
  misc_feature 1..33: note = Probe
  source 1..33: mol_type = other DNA

SEQ ID NO: 54455 - DNA, 37 bp, synthetic construct; identical to SEQ ID NO: 13936
  misc_feature 1..37: note = Probe
  source 1..37: mol_type = other DNA

SEQ ID NO: 54456 - DNA, 27 bp, synthetic construct
  misc_feature 1..27: note = Probe
  source 1..27: mol_type = other DNA
ggtgctaataacgccaaggtcgcgggt

SEQ ID NO: 54457 - DNA, 28 bp, synthetic construct
  misc_feature 1..28: note = Probe
  source 1..28: mol_type = other DNA
ggtgctaataacgccaaggtcgcgggtt

SEQ ID NO: 54458 - DNA, 27 bp, synthetic construct
  misc_feature 1..27: note = Probe
  source 1..27: mol_type = other DNA
ggtgctaataacgctaaggtcgcgggt

SEQ ID NO: 54459 - DNA, 27 bp, synthetic construct
  misc_feature 1..27: note = Probe
  source 1..27: mol_type = other DNA
ggtgctgataacaccaaggtcgcgggc

SEQ ID NO: 54460 - DNA, 29 bp, synthetic construct
  misc_feature 1..29: note = Probe
  source 1..29: mol_type = other DNA
ggtggagttaaagactttttctctgattt

SEQ ID NO: 54461 - DNA, 27 bp, synthetic construct
  misc_feature 1..27: note = Probe
  source 1..27: mol_type = other DNA
ggtggttcagtggtagaattctcgcct

SEQ ID NO: 54462 - DNA, 30 bp, synthetic construct; identical to SEQ ID NO: 6787
  misc_feature 1..30: note = Probe
  source 1..30: mol_type = other DNA

SEQ ID NO: 54463 - DNA, 22 bp, synthetic construct
  misc_feature 1..22: note = Probe
  source 1..22: mol_type = other DNA
ggtgtagtggtatcatgcaaga

SEQ ID NO: 54464 - DNA, 40 bp, synthetic construct
  misc_feature 1..40: note = Probe
  source 1..40: mol_type = other DNA
ggtgtagtggtatcatgcaagattcccattcttgcgaccc

SEQ ID NO: 54465 - DNA, 33 bp, synthetic construct; identical to SEQ ID NO: 22249
  misc_feature 1..33: note = Probe
  source 1..33: mol_type = other DNA

SEQ ID NO: 54466 - DNA, 38 bp, synthetic construct; identical to SEQ ID NO: 22251
  misc_feature 1..38: note = Probe
  source 1..38: mol_type = other DNA

SEQ ID NO: 54467 - DNA, 33 bp, synthetic construct; identical to SEQ ID NO: 22252
  misc_feature 1..33: note = Probe
  source 1..33: mol_type = other DNA

SEQ ID NO: 54468 - DNA, 38 bp, synthetic construct; identical to SEQ ID NO: 22254
  misc_feature 1..38: note = Probe
  source 1..38: mol_type = other DNA

SEQ ID NO: 54469 - DNA, 39 bp, synthetic construct; identical to SEQ ID NO: 22255
  misc_feature 1..39: note = Probe
  source 1..39: mol_type = other DNA

SEQ ID NO: 54470 - DNA, 33 bp, synthetic construct; identical to SEQ ID NO: 13950
  misc_feature 1..33: note = Probe
  source 1..33: mol_type = other DNA

SEQ ID NO: 54471 - DNA, 33 bp, synthetic construct
  misc_feature 1..33: note = Probe
  source 1..33: mol_type = other DNA
ggttaggattcctggttttcacccaggtggccc

SEQ ID NO: 54472 - DNA, 16 bp, synthetic construct
  misc_feature 1..16: note = Probe
  source 1..16: mol_type = other DNA
ggttaggattcggcgc

SEQ ID NO: 54473 - DNA, 17 bp, synthetic construct
  misc_feature 1..17: note = Probe
  source 1..17: mol_type = other DNA
ggttaggattcggcgct

SEQ ID NO: 54474 - DNA, 23 bp, synthetic construct
  misc_feature 1..23: note = Probe
  source 1..23: mol_type = other DNA
ggttaggattcggcgctctcacc

SEQ ID NO: 54475 - DNA, 26 bp, synthetic construct
  misc_feature 1..26: note = Probe
  source 1..26: mol_type = other DNA
ggttaggattcggcgctctcaccgcc

SEQ ID NO: 54476 - DNA, 28 bp, synthetic construct
  misc_feature 1..28: note = Probe
  source 1..28: mol_type = other DNA
ggttaggattcggcgctctcaccgccgc

SEQ ID NO: 54477 - DNA, 32 bp, synthetic construct; identical to SEQ ID NO: 32694
  misc_feature 1..32: note = Probe
  source 1..32: mol_type = other DNA

SEQ ID NO: 54478 - DNA, 34 bp, synthetic construct
  misc_feature 1..34: note = Probe
  source 1..34: mol_type = other DNA
ggttaggattcggcgctctcaccgccgcggcccg

SEQ ID NO: 54479 - DNA, 16 bp, synthetic construct
  misc_feature 1..16: note = Probe
  source 1..16: mol_type = other DNA
ggttagtactctgcgt

SEQ ID NO: 54480 - DNA, 23 bp, synthetic construct
  misc_feature 1..23: note = Probe
  source 1..23: mol_type = other DNA
ggttcagtggtagaattctcgcc

SEQ ID NO: 54481 - DNA, 24 bp, synthetic construct
  misc_feature 1..24: note = Probe
  source 1..24: mol_type = other DNA
ggttcagtggtagaattctcgcct

SEQ ID NO: 54482 - DNA, 25 bp, synthetic construct
  misc_feature 1..25: note = Probe
  source 1..25: mol_type = other DNA
ggttcagtggtagaattctcgcctg

SEQ ID NO: 54483 - DNA, 26 bp, synthetic construct
  misc_feature 1..26: note = Probe
  source 1..26: mol_type = other DNA
ggttcagtggtagaattctcgcctgc

SEQ ID NO: 54484 - DNA, 27 bp, synthetic construct
  misc_feature 1..27: note = Probe
  source 1..27: mol_type = other DNA
ggttcagtggtagaattctcgcctgcc

SEQ ID NO: 54485 - DNA, 29 bp, synthetic construct
  misc_feature 1..29: note = Probe
  source 1..29: mol_type = other DNA
ggttcagtggtagaattctcgcctgccac

SEQ ID NO: 54486 - DNA, 30 bp, synthetic construct
  misc_feature 1..30: note = Probe
  source 1..30: mol_type = other DNA
ggttcagtggtagaattctcgcctgccacg

SEQ ID NO: 54487 - DNA, 32 bp, synthetic construct; identical to SEQ ID NO: 22296
  misc_feature 1..32: note = Probe
  source 1..32: mol_type = other DNA

SEQ ID NO: 54488 - DNA, 40 bp, synthetic construct; identical to SEQ ID NO: 13957
  misc_feature 1..40: note = Probe
  source 1..40: mol_type = other DNA

SEQ ID NO: 54489 - DNA, 31 bp, synthetic construct; identical to SEQ ID NO: 1432
  misc_feature 1..31: note = Probe
  source 1..31: mol_type = other DNA

SEQ ID NO: 54490 - DNA, 50 bp, synthetic construct; identical to SEQ ID NO: 6812
  misc_feature 1..50: note = Probe
  source 1..50: mol_type = other DNA

SEQ ID NO: 54491 - DNA, 24 bp, synthetic construct
  misc_feature 1..24: note = Probe
  source 1..24: mol_type = other DNA
ggttccatagtgtagtggttatca

SEQ ID NO: 54492 - DNA, 25 bp, synthetic construct
  misc_feature 1..25: note = Probe
  source 1..25: mol_type = other DNA
ggttccatagtgtagtggttatcac

SEQ ID NO: 54493 - DNA, 26 bp, synthetic construct
  misc_feature 1..26: note = Probe
  source 1..26: mol_type = other DNA
ggttccatagtgtagtggttatcaca

SEQ ID NO: 54494 - DNA, 31 bp, synthetic construct; identical to SEQ ID NO: 1443
  misc_feature 1..31: note = Probe
  source 1..31: mol_type = other DNA

SEQ ID NO: 54495 - DNA, 26 bp, synthetic construct
  misc_feature 1..26: note = Probe
  source 1..26: mol_type = other DNA
ggttccatagtgtagtggttatcacg

SEQ ID NO: 54496 - DNA, 27 bp, synthetic construct
  misc_feature 1..27: note = Probe
  source 1..27: mol_type = other DNA
ggttccatagtgtagtggttatcacgt

SEQ ID NO: 54497 - DNA, 29 bp, synthetic construct
  misc_feature 1..29: note = Probe
  source 1..29: mol_type = other DNA
ggttccatagtgtagtggttatcacgtct

SEQ ID NO: 54498 - DNA, 30 bp, synthetic construct; identical to SEQ ID NO: 1451
  misc_feature 1..30: note = Probe
  source 1..30: mol_type = other DNA

SEQ ID NO: 54499 - DNA, 32 bp, synthetic construct; identical to SEQ ID NO: 1453
  misc_feature 1..32: note = Probe
  source 1..32: mol_type = other DNA

SEQ ID NO: 54500 - DNA, 33 bp, synthetic construct; identical to SEQ ID NO: 1454
  misc_feature 1..33: note = Probe
  source 1..33: mol_type = other DNA

SEQ ID NO: 54501 - DNA, 34 bp, synthetic construct; identical to SEQ ID NO: 1455
  misc_feature 1..34: note = Probe
  source 1..34: mol_type = other DNA

SEQ ID NO: 54502 - DNA, 39 bp, synthetic construct; identical to SEQ ID NO: 6819
  misc_feature 1..39: note = Probe
  source 1..39: mol_type = other DNA

SEQ ID NO: 54503 - DNA, 23 bp, synthetic construct
  misc_feature 1..23: note = Probe
  source 1..23: mol_type = other DNA
ggttccatggtgtaatggttagc

SEQ ID NO: 54504 - DNA, 29 bp, synthetic construct
  misc_feature 1..29: note = Probe
  source 1..29: mol_type = other DNA
ggttccatggtgtaatggttagcactctg

SEQ ID NO: 54505 - DNA, 30 bp, synthetic construct; identical to SEQ ID NO: 6826
  misc_feature 1..30: note = Probe
  source 1..30: mol_type = other DNA

SEQ ID NO: 54506 - DNA, 50 bp, synthetic construct; identical to SEQ ID NO: 25533
  misc_feature 1..50: note = Probe
  source 1..50: mol_type = other DNA

SEQ ID NO: 54507 - DNA, 25 bp, synthetic construct
  misc_feature 1..25: note = Probe
  source 1..25: mol_type = other DNA
ggttcgattccccgacggggaggca

SEQ ID NO: 54508 - DNA, 25 bp, synthetic construct
  misc_feature 1..25: note = Probe
  source 1..25: mol_type = other DNA
ggttcgattctcatagtcctagaaa

SEQ ID NO: 54509 - DNA, 25 bp, synthetic construct
  misc_feature 1..25: note = Probe
  source 1..25: mol_type = other DNA
ggttgtagtccgtgcgagaataatg

SEQ ID NO: 54510 - DNA, 38 bp, synthetic construct; identical to SEQ ID NO: 6871
  misc_feature 1..38: note = Probe
  source 1..38: mol_type = other DNA

SEQ ID NO: 54511 - DNA, 20 bp, synthetic construct
  misc_feature 1..20: note = Probe
  source 1..20: mol_type = other DNA
gtaaacaggagatcctgggt

SEQ ID NO: 54512 - DNA, 20 bp, synthetic construct
  misc_feature 1..20: note = Probe
  source 1..20: mol_type = other DNA
gtaaaccaggggtcgcgagt

SEQ ID NO: 54513 - DNA, 21 bp, synthetic construct
  misc_feature 1..21: note = Probe
  source 1..21: mol_type = other DNA
gtaaaccaggggtcgcgagtt

SEQ ID NO: 54514 - DNA, 20 bp, synthetic construct
  misc_feature 1..20: note = Probe
  source 1..20: mol_type = other DNA
gtaaaccgaagatcacgggt

SEQ ID NO: 54515 - DNA, 20 bp, synthetic construct
  misc_feature 1..20: note = Probe
  source 1..20: mol_type = other DNA
gtaaaccgaagatcgcgggt

SEQ ID NO: 54516 - DNA, 37 bp, synthetic construct; identical to SEQ ID NO: 6880
  misc_feature 1..37: note = Probe
  source 1..37: mol_type = other DNA

SEQ ID NO: 54517 - DNA, 38 bp, synthetic construct; identical to SEQ ID NO: 6881
  misc_feature 1..38: note = Probe
  source 1..38: mol_type = other DNA

SEQ ID NO: 54518 - DNA, 42 bp, synthetic construct; identical to SEQ ID NO: 6884
  misc_feature 1..42: note = Probe
  source 1..42: mol_type = other DNA

SEQ ID NO: 54519 - DNA, 45 bp, synthetic construct; identical to SEQ ID NO: 6886
  misc_feature 1..45: note = Probe
  source 1..45: mol_type = other DNA

SEQ ID NO: 54520 - DNA, 40 bp, synthetic construct; identical to SEQ ID NO: 6888
  misc_feature 1..40: note = Probe
  source 1..40: mol_type = other DNA

SEQ ID NO: 54521 - DNA, 31 bp, synthetic construct; identical to SEQ ID NO: 6892
  misc_feature 1..31: note = Probe
  source 1..31: mol_type = other DNA

SEQ ID NO: 54522 - DNA, 32 bp, synthetic construct; identical to SEQ ID NO: 6893
  misc_feature 1..32: note = Probe
  source 1..32: mol_type = other DNA

SEQ ID NO: 54523 - DNA, 33 bp, synthetic construct; identical to SEQ ID NO: 6894
  misc_feature 1..33: note = Probe
  source 1..33: mol_type = other DNA

SEQ ID NO: 54524 - DNA, 34 bp, synthetic construct; identical to SEQ ID NO: 6895
  misc_feature 1..34: note = Probe
  source 1..34: mol_type = other DNA

SEQ ID NO: 54525 - DNA, 35 bp, synthetic construct; identical to SEQ ID NO: 6896
  misc_feature 1..35: note = Probe
  source 1..35: mol_type = other DNA

SEQ ID NO: 54526 - DNA, 36 bp, synthetic construct; identical to SEQ ID NO: 6897
  misc_feature 1..36: note = Probe
  source 1..36: mol_type = other DNA

SEQ ID NO: 54527 - DNA, 37 bp, synthetic construct; identical to SEQ ID NO: 6898
  misc_feature 1..37: note = Probe
  source 1..37: mol_type = other DNA

SEQ ID NO: 54528 - DNA, 43 bp, synthetic construct; identical to SEQ ID NO: 6903
  misc_feature 1..43: note = Probe
  source 1..43: mol_type = other DNA

SEQ ID NO: 54529 - DNA, 44 bp, synthetic construct; identical to SEQ ID NO: 6904
  misc_feature 1..44: note = Probe
  source 1..44: mol_type = other DNA

SEQ ID NO: 54530 - DNA, 45 bp, synthetic construct; identical to SEQ ID NO: 6905
  misc_feature 1..45: note = Probe
  source 1..45: mol_type = other DNA

SEQ ID NO: 54531 - DNA, 46 bp, synthetic construct; identical to SEQ ID NO: 6906
  misc_feature 1..46: note = Probe
  source 1..46: mol_type = other DNA

SEQ ID NO: 54532 - DNA, 50 bp, synthetic construct; identical to SEQ ID NO: 6907
  misc_feature 1..50: note = Probe
  source 1..50: mol_type = other DNA

SEQ ID NO: 54533 - DNA, 20 bp, synthetic construct
  misc_feature 1..20: note = Probe
  source 1..20: mol_type = other DNA
gtaatggttagcactctgga

SEQ ID NO: 54534 - DNA, 50 bp, synthetic construct; identical to SEQ ID NO: 1465
  misc_feature 1..50: note = Probe
  source 1..50: mol_type = other DNA

SEQ ID NO: 54535 - DNA, 31 bp, synthetic construct; identical to SEQ ID NO: 22440
  misc_feature 1..31: note = Probe
  source 1..31: mol_type = other DNA

SEQ ID NO: 54536 - DNA, 47 bp, synthetic construct
  misc_feature 1..47: note = Probe
  source 1..47: mol_type = other DNA
gtagaattctcgcctgccacgcgggaggcccgggttcgattcccggc

SEQ ID NO: 54537 - DNA, 50 bp, synthetic construct; identical to SEQ ID NO: 22442
  misc_feature 1..50: note = Probe
  source 1..50: mol_type = other DNA

SEQ ID NO: 54538 - DNA, 36 bp, synthetic construct; identical to SEQ ID NO: 22446
  misc_feature 1..36: note = Probe
  source 1..36: mol_type = other DNA

SEQ ID NO: 54539 - DNA, 21 bp, synthetic construct
  misc_feature 1..21: note = Probe
  source 1..21: mol_type = other DNA
gtagtccgtgcgagaataatg

SEQ ID NO: 54540 - DNA, 16 bp, synthetic construct
  misc_feature 1..16: note = Probe
  source 1..16: mol_type = other DNA
gtagtggtatcatgca

SEQ ID NO: 54541 - DNA, 19 bp, synthetic construct
  misc_feature 1..19: note = Probe
  source 1..19: mol_type = other DNA
gtagtggtatcatgcaaga

SEQ ID NO: 54542 - DNA, 38 bp, synthetic construct
  misc_feature 1..38: note = Probe
  source 1..38: mol_type = other DNA
gtagtggtatcatgcaagattcccattcttgcgacccg

SEQ ID NO: 54543 - DNA, 17 bp, synthetic construct
  misc_feature 1..17: note = Probe
  source 1..17: mol_type = other DNA
gtagtggttatcacgtt

SEQ ID NO: 54544 - DNA, 43 bp, synthetic construct; identical to SEQ ID NO: 22465
  misc_feature 1..43: note = Probe
  source 1..43: mol_type = other DNA

SEQ ID NO: 54545 - DNA, 26 bp, synthetic construct
  misc_feature 1..26: note = Probe
  source 1..26: mol_type = other DNA
gtagtgtagtggttatcacgttcgcc

SEQ ID NO: 54546 - DNA, 31 bp, synthetic construct; identical to SEQ ID NO: 22485
  misc_feature 1..31: note = Probe
  source 1..31: mol_type = other DNA

SEQ ID NO: 54547 - DNA, 36 bp, synthetic construct; identical to SEQ ID NO: 22487
  misc_feature 1..36: note = Probe
  source 1..36: mol_type = other DNA

SEQ ID NO: 54548 - DNA, 28 bp, synthetic construct
  misc_feature 1..28: note = Probe
  source 1..28: mol_type = other DNA
gtatccccgcctgtcacgcgggagaccg

SEQ ID NO: 54549 - DNA, 38 bp, synthetic construct; identical to SEQ ID NO: 22501
  misc_feature 1..38: note = Probe
  source 1..38: mol_type = other DNA

SEQ ID NO: 54550 - DNA, 31 bp, synthetic construct; identical to SEQ ID NO: 22513
  misc_feature 1..31: note = Probe
  source 1..31: mol_type = other DNA

SEQ ID NO: 54551 - DNA, 32 bp, synthetic construct; identical to SEQ ID NO: 6929
  misc_feature 1..32: note = Probe
  source 1..32: mol_type = other DNA

SEQ ID NO: 54552 - DNA, 33 bp, synthetic construct; identical to SEQ ID NO: 6930
  misc_feature 1..33: note = Probe
  source 1..33: mol_type = other DNA

SEQ ID NO: 54553 - DNA, 37 bp, synthetic construct; identical to SEQ ID NO: 22519
  misc_feature 1..37: note = Probe
  source 1..37: mol_type = other DNA

SEQ ID NO: 54554 - DNA, 38 bp, synthetic construct
  misc_feature 1..38: note = Probe
  source 1..38: mol_type = other DNA
gtatgattctcgcttagggtgcgagaggtcccgggttc

SEQ ID NO: 54555 - DNA, 39 bp, synthetic construct
  misc_feature 1..39: note = Probe
  source 1..39: mol_type = other DNA
gtatgattctcgcttagggtgcgagaggtcccgggttca

SEQ ID NO: 54556 - DNA, 31 bp, synthetic construct; identical to SEQ ID NO: 22520
  misc_feature 1..31: note = Probe
  source 1..31: mol_type = other DNA

SEQ ID NO: 54557 - DNA, 32 bp, synthetic construct; identical to SEQ ID NO: 6931
  misc_feature 1..32: note = Probe
  source 1..32: mol_type = other DNA

SEQ ID NO: 54558 - DNA, 33 bp, synthetic construct; identical to SEQ ID NO: 6932
  misc_feature 1..33: note = Probe
  source 1..33: mol_type = other DNA

SEQ ID NO: 54559 - DNA, 37 bp, synthetic construct; identical to SEQ ID NO: 6933
  misc_feature 1..37: note = Probe
  source 1..37: mol_type = other DNA

SEQ ID NO: 54560 - DNA, 38 bp, synthetic construct
  misc_feature 1..38: note = Probe
  source 1..38: mol_type = other DNA
gtatgattctcgcttcgggtgcgagaggtcccgggttc

SEQ ID NO: 54561 - DNA, 39 bp, synthetic construct
  misc_feature 1..39: note = Probe
  source 1..39: mol_type = other DNA
gtatgattctcgcttcgggtgcgagaggtcccgggttca

SEQ ID NO: 54562 - DNA, 31 bp, synthetic construct; identical to SEQ ID NO: 22525
  misc_feature 1..31: note = Probe
  source 1..31: mol_type = other DNA

SEQ ID NO: 54563 - DNA, 32 bp, synthetic construct; identical to SEQ ID NO: 1472
  misc_feature 1..32: note = Probe
  source 1..32: mol_type = other DNA

SEQ ID NO: 54564 - DNA, 33 bp, synthetic construct; identical to SEQ ID NO: 6934
  misc_feature 1..33: note = Probe
  source 1..33: mol_type = other DNA

SEQ ID NO: 54565 - DNA, 37 bp, synthetic construct; identical to SEQ ID NO: 14023
  misc_feature 1..37: note = Probe
  source 1..37: mol_type = other DNA

SEQ ID NO: 54566 - DNA, 38 bp, synthetic construct
  misc_feature 1..38: note = Probe
  source 1..38: mol_type = other DNA
gtatgattctcgctttgggtgcgagaggtcccgggttc

SEQ ID NO: 54567 - DNA, 39 bp, synthetic construct
  misc_feature 1..39: note = Probe
  source 1..39: mol_type = other DNA
gtatgattctcgctttgggtgcgagaggtcccgggttca

SEQ ID NO: 54568 - DNA, 31 bp, synthetic construct
  misc_feature 1..31: note = Probe
  source 1..31: mol_type = other DNA
gtatgattctcggtttgggtccgagaggtcc

SEQ ID NO: 54569 - DNA, 37 bp, synthetic construct
  misc_feature 1..37: note = Probe
  source 1..37: mol_type = other DNA
gtatgattctcggtttgggtccgagaggtcccgggtt

SEQ ID NO: 54570 - DNA, 42 bp, synthetic construct; identical to SEQ ID NO: 6950
  misc_feature 1..42: note = Probe
  source 1..42: mol_type = other DNA

SEQ ID NO: 54571 - DNA, 18 bp, synthetic construct
  misc_feature 1..18: note = Probe
  source 1..18: mol_type = other DNA
gtcacggtggccgagtgg

SEQ ID NO: 54572 - DNA, 20 bp, synthetic construct
  misc_feature 1..20: note = Probe
  source 1..20: mol_type = other DNA
gtcacggtggccgagtggtt

SEQ ID NO: 54573 - DNA, 31 bp, synthetic construct; identical to SEQ ID NO: 6959
  misc_feature 1..31: note = Probe
  source 1..31: mol_type = other DNA

SEQ ID NO: 54574 - DNA, 26 bp, synthetic construct
  misc_feature 1..26: note = Probe
  source 1..26: mol_type = other DNA
gtcagctaaataagctatcgggccca

SEQ ID NO: 54575 - DNA, 28 bp, synthetic construct
  misc_feature 1..28: note = Probe
  source 1..28: mol_type = other DNA
gtcagctaaataagctatcgggcccata

SEQ ID NO: 54576 - DNA, 29 bp, synthetic construct
  misc_feature 1..29: note = Probe
  source 1..29: mol_type = other DNA
gtcagctaaataagctatcgggcccatac

SEQ ID NO: 54577 - DNA, 36 bp, synthetic construct; identical to SEQ ID NO: 6967
  misc_feature 1..36: note = Probe
  source 1..36: mol_type = other DNA

SEQ ID NO: 54578 - DNA, 37 bp, synthetic construct; identical to SEQ ID NO: 6968
  misc_feature 1..37: note = Probe
  source 1..37: mol_type = other DNA

SEQ ID NO: 54579 - DNA, 38 bp, synthetic construct; identical to SEQ ID NO: 6969
  misc_feature 1..38: note = Probe
  source 1..38: mol_type = other DNA

SEQ ID NO: 54580 - DNA, 39 bp, synthetic construct; identical to SEQ ID NO: 6970
  misc_feature 1..39: note = Probe
  source 1..39: mol_type = other DNA

SEQ ID NO: 54581 - DNA, 40 bp, synthetic construct; identical to SEQ ID NO: 6971
  misc_feature 1..40: note = Probe
  source 1..40: mol_type = other DNA

SEQ ID NO: 54582 - DNA, 41 bp, synthetic construct; identical to SEQ ID NO: 6972
  misc_feature 1..41: note = Probe
  source 1..41: mol_type = other DNA

SEQ ID NO: 54583 - DNA, 18 bp, synthetic construct
  misc_feature 1..18: note = Probe
  source 1..18: mol_type = other DNA
gtcaggatggccgagcgg

SEQ ID NO: 54584 - DNA, 19 bp, synthetic construct
  misc_feature 1..19: note = Probe
  source 1..19: mol_type = other DNA
gtcaggatggccgagcggt

SEQ ID NO: 54585 - DNA, 20 bp, synthetic construct
  misc_feature 1..20: note = Probe
  source 1..20: mol_type = other DNA
gtcaggatggccgagcggtc

SEQ ID NO: 54586 - DNA, 21 bp, synthetic construct
  misc_feature 1..21: note = Probe
  source 1..21: mol_type = other DNA
gtcaggatggccgagcggtct

SEQ ID NO: 54587 - DNA, 22 bp, synthetic construct
  misc_feature 1..22: note = Probe
  source 1..22: mol_type = other DNA
gtcaggatggccgagcggtcta

SEQ ID NO: 54588 - DNA, 23 bp, synthetic construct
  misc_feature 1..23: note = Probe
  source 1..23: mol_type = other DNA
gtcaggatggccgagcggtctaa

SEQ ID NO: 54589 - DNA, 24 bp, synthetic construct
  misc_feature 1..24: note = Probe
  source 1..24: mol_type = other DNA
gtcaggatggccgagcggtctaag

SEQ ID NO: 54590 - DNA, 25 bp, synthetic construct
  misc_feature 1..25: note = Probe
  source 1..25: mol_type = other DNA
gtcaggatggccgagcggtctaagg

SEQ ID NO: 54591 - DNA, 18 bp, synthetic construct
  misc_feature 1..18: note = Probe
  source 1..18: mol_type = other DNA
gtcaggatggccgagtgg

SEQ ID NO: 54592 - DNA, 22 bp, synthetic construct
  misc_feature 1..22: note = Probe
  source 1..22: mol_type = other DNA
gtcaggatggccgagtggtcta

SEQ ID NO: 54593 - DNA, 25 bp, synthetic construct
  misc_feature 1..25: note = Probe
  source 1..25: mol_type = other DNA
gtcaggatggccgagtggtctaagg

SEQ ID NO: 54594 - DNA, 20 bp, synthetic construct
  misc_feature 1..20: note = Probe
  source 1..20: mol_type = other DNA
gtcatgggtggttgcgtttt

SEQ ID NO: 54595 - DNA, 21 bp, synthetic construct
  misc_feature 1..21: note = Probe
  source 1..21: mol_type = other DNA
gtcatgggtggttgcgttttg

SEQ ID NO: 54596 - DNA, 22 bp, synthetic construct
  misc_feature 1..22: note = Probe
  source 1..22: mol_type = other DNA
gtcatgggtggttgcgttttgg

SEQ ID NO: 54597 - DNA, 23 bp, synthetic construct
  misc_feature 1..23: note = Probe
  source 1..23: mol_type = other DNA
gtcatgggtggttgcgttttgga

SEQ ID NO: 54598 - DNA, 18 bp, synthetic construct
  misc_feature 1..18: note = Probe
  source 1..18: mol_type = other DNA
gtccctgtccaggcgcta

SEQ ID NO: 54599 - DNA, 16 bp, synthetic construct
  misc_feature 1..16: note = Probe
  source 1..16: mol_type = other DNA
gtccttgtagtataaa

SEQ ID NO: 54600 - DNA, 26 bp, synthetic construct
  misc_feature 1..26: note = Probe
  source 1..26: mol_type = other DNA
gtccttgtagtataaactaatacacc

SEQ ID NO: 54601 - DNA, 27 bp, synthetic construct
  misc_feature 1..27: note = Probe
  source 1..27: mol_type = other DNA
gtccttgtagtataaactaatacacca

SEQ ID NO: 54602 - DNA, 28 bp, synthetic construct
  misc_feature 1..28: note = Probe
  source 1..28: mol_type = other DNA
gtccttgtagtataaactaatacaccag

SEQ ID NO: 54603 - DNA, 30 bp, synthetic construct; identical to SEQ ID NO: 1487
  misc_feature 1..30: note = Probe
  source 1..30: mol_type = other DNA

SEQ ID NO: 54604 - DNA, 31 bp, synthetic construct; identical to SEQ ID NO: 1488
  misc_feature 1..31: note = Probe
  source 1..31: mol_type = other DNA

SEQ ID NO: 54605 - DNA, 32 bp, synthetic construct; identical to SEQ ID NO: 7010
  misc_feature 1..32: note = Probe
  source 1..32: mol_type = other DNA

SEQ ID NO: 54606 - DNA, 33 bp, synthetic construct; identical to SEQ ID NO: 7011
  misc_feature 1..33: note = Probe
  source 1..33: mol_type = other DNA

SEQ ID NO: 54607 - DNA, 34 bp, synthetic construct; identical to SEQ ID NO: 7012
  misc_feature 1..34: note = Probe
  source 1..34: mol_type = other DNA

SEQ ID NO: 54608 - DNA, 37 bp, synthetic construct
  misc_feature 1..37: note = Probe
  source 1..37: mol_type = other DNA
gtccttgtagtataaactaatacaccagtcttgtaaa

SEQ ID NO: 54609 - DNA, 38 bp, synthetic construct
  misc_feature 1..38: note = Probe
  source 1..38: mol_type = other DNA
gtccttgtagtataaactaatacaccagtcttgtaaac

SEQ ID NO: 54610 - DNA, 50 bp, synthetic construct; identical to SEQ ID NO: 1489
  misc_feature 1..50: note = Probe
  source 1..50: mol_type = other DNA

SEQ ID NO: 54611 - DNA, 18 bp, synthetic construct
  misc_feature 1..18: note = Probe
  source 1..18: mol_type = other DNA
gtcggtagagcatcagac

SEQ ID NO: 54612 - DNA, 16 bp, synthetic construct
  misc_feature 1..16: note = Probe
  source 1..16: mol_type = other DNA
gtcggtagagcatgag

SEQ ID NO: 54613 - DNA, 18 bp, synthetic construct
  misc_feature 1..18: note = Probe
  source 1..18: mol_type = other DNA
gtcggtagagcatgagac

SEQ ID NO: 54614 - DNA, 35 bp, synthetic construct; identical to SEQ ID NO: 1492
  misc_feature 1..35: note = Probe
  source 1..35: mol_type = other DNA

SEQ ID NO: 54615 - DNA, 20 bp, synthetic construct
  misc_feature 1..20: note = Probe
  source 1..20: mol_type = other DNA
gtcggtagagcatgggactc

SEQ ID NO: 54616 - DNA, 26 bp, synthetic construct
  misc_feature 1..26: note = Probe
  source 1..26: mol_type = other DNA
gtcggtagagcatgggactcttaatc

SEQ ID NO: 54617 - DNA, 28 bp, synthetic construct
  misc_feature 1..28: note = Probe
  source 1..28: mol_type = other DNA
gtcggtagagcatgggactcttaatccc

SEQ ID NO: 54618 - DNA, 35 bp, synthetic construct; identical to SEQ ID NO: 1495
  misc_feature 1..35: note = Probe
  source 1..35: mol_type = other DNA

SEQ ID NO: 54619 - DNA, 36 bp, synthetic construct; identical to SEQ ID NO: 22678
  misc_feature 1..36: note = Probe
  source 1..36: mol_type = other DNA

SEQ ID NO: 54620 - DNA, 40 bp, synthetic construct; identical to SEQ ID NO: 14063
  misc_feature 1..40: note = Probe
  source 1..40: mol_type = other DNA

SEQ ID NO: 54621 - DNA, 30 bp, synthetic construct; identical to SEQ ID NO: 7024
  misc_feature 1..30: note = Probe
  source 1..30: mol_type = other DNA

SEQ ID NO: 54622 - DNA, 25 bp, synthetic construct
  misc_feature 1..25: note = Probe
  source 1..25: mol_type = other DNA
gtctaacaacatggctttctcaact

SEQ ID NO: 54623 - DNA, 21 bp, synthetic construct
  misc_feature 1..21: note = Probe
  source 1..21: mol_type = other DNA
gtctaggggtatgattctcgc

SEQ ID NO: 54624 - DNA, 22 bp, synthetic construct
  misc_feature 1..22: note = Probe
  source 1..22: mol_type = other DNA
gtctaggggtatgattctcgct

SEQ ID NO: 54625 - DNA, 40 bp, synthetic construct
  misc_feature 1..40: note = Probe
  source 1..40: mol_type = other DNA
gtctagtggttaggattcggcgctctcaccgccgcggccc

SEQ ID NO: 54626 - DNA, 23 bp, synthetic construct
  misc_feature 1..23: note = Probe
  source 1..23: mol_type = other DNA
gtctcataatctgaaggtcctga

SEQ ID NO: 54627 - DNA, 25 bp, synthetic construct
  misc_feature 1..25: note = Probe
  source 1..25: mol_type = other DNA
gtctcataatctgaaggtcctgagt

SEQ ID NO: 54628 - DNA, 22 bp, synthetic construct
  misc_feature 1..22: note = Probe
  source 1..22: mol_type = other DNA
gtctcataatctgaaggtcgtg

SEQ ID NO: 54629 - DNA, 24 bp, synthetic construct
  misc_feature 1..24: note = Probe
  source 1..24: mol_type = other DNA
gtctcataatctgaaggtcgtgag

SEQ ID NO: 54630 - DNA, 26 bp, synthetic construct
  misc_feature 1..26: note = Probe
  source 1..26: mol_type = other DNA
gtctcataatctgaaggtcgtgagtt

SEQ ID NO: 54631 - DNA, 27 bp, synthetic construct
  misc_feature 1..27: note = Probe
  source 1..27: mol_type = other DNA
gtctcataatctgaaggtcgtgagttc

SEQ ID NO: 54632 - DNA, 27 bp, synthetic construct
  misc_feature 1..27: note = Probe
  source 1..27: mol_type = other DNA
gtctccatctattgatgagggtcttac

SEQ ID NO: 54633 - DNA, 25 bp, synthetic construct
  misc_feature 1..25: note = Probe
  source 1..25: mol_type = other DNA
gtctcgtaaaccgaagatcacgggt

SEQ ID NO: 54634 - DNA, 37 bp, synthetic construct; identical to SEQ ID NO: 49749
  misc_feature 1..37: note = Probe
  source 1..37: mol_type = other DNA

SEQ ID NO: 54635 - DNA, 42 bp, synthetic construct; identical to SEQ ID NO: 7048
  misc_feature 1..42: note = Probe
  source 1..42: mol_type = other DNA

SEQ ID NO: 54636 - DNA, 33 bp, synthetic construct; identical to SEQ ID NO: 14073
  misc_feature 1..33: note = Probe
  source 1..33: mol_type = other DNA

SEQ ID NO: 54637 - DNA, 18 bp, synthetic construct
  misc_feature 1..18: note = Probe
  source 1..18: mol_type = other DNA
gtgagtatccccgcctgt

SEQ ID NO: 54638 - DNA, 20 bp, synthetic construct
  misc_feature 1..20: note = Probe
  source 1..20: mol_type = other DNA
gtgagtatccccgcctgtca

SEQ ID NO: 54639 - DNA, 21 bp, synthetic construct
  misc_feature 1..21: note = Probe
  source 1..21: mol_type = other DNA
gtgagtatccccgcctgtcac

SEQ ID NO: 54640 - DNA, 31 bp, synthetic construct; identical to SEQ ID NO: 14078
  misc_feature 1..31: note = Probe
  source 1..31: mol_type = other DNA

SEQ ID NO: 54641 - DNA, 32 bp, synthetic construct; identical to SEQ ID NO: 22740
  misc_feature 1..32: note = Probe
  source 1..32: mol_type = other DNA

SEQ ID NO: 54642 - DNA, 27 bp, synthetic construct
  misc_feature 1..27: note = Probe
  source 1..27: mol_type = other DNA
gtgatcgtatagtggttagtactctgc

SEQ ID NO: 54643 - DNA, 17 bp, synthetic construct
  misc_feature 1..17: note = Probe
  source 1..17: mol_type = other DNA
gtgcacttggacgaacc

SEQ ID NO: 54644 - DNA, 26 bp, synthetic construct
  misc_feature 1..26: note = Probe
  source 1..26: mol_type = other DNA
gtgctaataacgccaaggtcgcgggt

SEQ ID NO: 54645 - DNA, 27 bp, synthetic construct
  misc_feature 1..27: note = Probe
  source 1..27: mol_type = other DNA
gtgctaataacgccaaggtcgcgggtt

SEQ ID NO: 54646 - DNA, 26 bp, synthetic construct
  misc_feature 1..26: note = Probe
  source 1..26: mol_type = other DNA
gtgctaataacgctaaggtcgcgggt

SEQ ID NO: 54647 - DNA, 28 bp, synthetic construct
  misc_feature 1..28: note = Probe
  source 1..28: mol_type = other DNA
gtggagttaaagactttttctctgattt

SEQ ID NO: 54648 - DNA, 35 bp, synthetic construct; identical to SEQ ID NO: 14087
  misc_feature 1..35: note = Probe
  source 1..35: mol_type = other DNA

SEQ ID NO: 54649 - DNA, 16 bp, synthetic construct
  misc_feature 1..16: note = Probe
  source 1..16: mol_type = other DNA
gtggtagaattctcgc

SEQ ID NO: 54650 - DNA, 17 bp, synthetic construct
  misc_feature 1..17: note = Probe
  source 1..17: mol_type = other DNA
gtggtagaattctcgcc

SEQ ID NO: 54651 - DNA, 18 bp, synthetic construct
  misc_feature 1..18: note = Probe
  source 1..18: mol_type = other DNA
gtggtagaattctcgcct

SEQ ID NO: 54652 - DNA, 19 bp, synthetic construct
  misc_feature 1..19: note = Probe
  source 1..19: mol_type = other DNA
gtggtagaattctcgcctg

SEQ ID NO: 54653 - DNA, 20 bp, synthetic construct
  misc_feature 1..20: note = Probe
  source 1..20: mol_type = other DNA
gtggtagaattctcgcctgc

SEQ ID NO: 54654 - DNA, 21 bp, synthetic construct
  misc_feature 1..21: note = Probe
  source 1..21: mol_type = other DNA
gtggtagaattctcgcctgcc

SEQ ID NO: 54655 - DNA, 16 bp, synthetic construct
  misc_feature 1..16: note = Probe
  source 1..16: mol_type = other DNA
gtggtatcatgcaaga

SEQ ID NO: 54656 - DNA, 34 bp, synthetic construct
  misc_feature 1..34: note = Probe
  source 1..34: mol_type = other DNA
gtggtatcatgcaagattcccattcttgcgaccc

SEQ ID NO: 54657 - DNA, 40 bp, synthetic construct; identical to SEQ ID NO: 22822
  misc_feature 1..40: note = Probe
  source 1..40: mol_type = other DNA

SEQ ID NO: 54658 - DNA, 16 bp, synthetic construct
  misc_feature 1..16: note = Probe
  source 1..16: mol_type = other DNA
gtggtgagtatccccg

SEQ ID NO: 54659 - DNA, 36 bp, synthetic construct; identical to SEQ ID NO: 14097
  misc_feature 1..36: note = Probe
  source 1..36: mol_type = other DNA

SEQ ID NO: 54660 - DNA, 35 bp, synthetic construct; identical to SEQ ID NO: 22844
  misc_feature 1..35: note = Probe
  source 1..35: mol_type = other DNA

SEQ ID NO: 54661 - DNA, 16 bp, synthetic construct
  misc_feature 1..16: note = Probe
  source 1..16: mol_type = other DNA
gtggttaggattcggc

SEQ ID NO: 54662 - DNA, 24 bp, synthetic construct
  misc_feature 1..24: note = Probe
  source 1..24: mol_type = other DNA
gtggttaggattcggcgctctcac

SEQ ID NO: 54663 - DNA, 25 bp, synthetic construct
  misc_feature 1..25: note = Probe
  source 1..25: mol_type = other DNA
gtggttaggattcggcgctctcacc

SEQ ID NO: 54664 - DNA, 28 bp, synthetic construct
  misc_feature 1..28: note = Probe
  source 1..28: mol_type = other DNA
gtggttaggattcggcgctctcaccgcc

SEQ ID NO: 54665 - DNA, 34 bp, synthetic construct; identical to SEQ ID NO: 33195
  misc_feature 1..34: note = Probe
  source 1..34: mol_type = other DNA

SEQ ID NO: 54666 - DNA, 36 bp, synthetic construct; identical to SEQ ID NO: 22856
  misc_feature 1..36: note = Probe
  source 1..36: mol_type = other DNA

SEQ ID NO: 54667 - DNA, 17 bp, synthetic construct
  misc_feature 1..17: note = Probe
  source 1..17: mol_type = other DNA
gtggttagtactctgcg

SEQ ID NO: 54668 - DNA, 18 bp, synthetic construct
  misc_feature 1..18: note = Probe
  source 1..18: mol_type = other DNA
gtggttagtactctgcgt

SEQ ID NO: 54669 - DNA, 40 bp, synthetic construct; identical to SEQ ID NO: 22865
  misc_feature 1..40: note = Probe
  source 1..40: mol_type = other DNA

SEQ ID NO: 54670 - DNA, 40 bp, synthetic construct; identical to SEQ ID NO: 14115
  misc_feature 1..40: note = Probe
  source 1..40: mol_type = other DNA

SEQ ID NO: 54671 - DNA, 27 bp, synthetic construct
  misc_feature 1..27: note = Probe
  source 1..27: mol_type = other DNA
gtggttgtagtccgtgcgagaataatg

SEQ ID NO: 54672 - DNA, 21 bp, synthetic construct
  misc_feature 1..21: note = Probe
  source 1..21: mol_type = other DNA
gtgtagtggtatcatgcaaga

SEQ ID NO: 54673 - DNA, 45 bp, synthetic construct; identical to SEQ ID NO: 7103
  misc_feature 1..45: note = Probe
  source 1..45: mol_type = other DNA

SEQ ID NO: 54674 - DNA, 23 bp, synthetic construct
  misc_feature 1..23: note = Probe
  source 1..23: mol_type = other DNA
gtgtgaatccttcgatagctcag

SEQ ID NO: 54675 - DNA, 26 bp, synthetic construct
  misc_feature 1..26: note = Probe
  source 1..26: mol_type = other DNA
gtgtttgtgggtttaagtcccattgg

SEQ ID NO: 54676 - DNA, 27 bp, synthetic construct
  misc_feature 1..27: note = Probe
  source 1..27: mol_type = other DNA
gtgtttgtgggtttaagtcccattggt

SEQ ID NO: 54677 - DNA, 29 bp, synthetic construct
  misc_feature 1..29: note = Probe
  source 1..29: mol_type = other DNA
gtgtttgtgggtttaagtcccattggtct

SEQ ID NO: 54678 - DNA, 40 bp, synthetic construct; identical to SEQ ID NO: 7120
  misc_feature 1..40: note = Probe
  source 1..40: mol_type = other DNA

SEQ ID NO: 54679 - DNA, 42 bp, synthetic construct; identical to SEQ ID NO: 7122
  misc_feature 1..42: note = Probe
  source 1..42: mol_type = other DNA

SEQ ID NO: 54680 - DNA, 42 bp, synthetic construct
  misc_feature 1..42: note = Probe
  source 1..42: mol_type = other DNA
gttaaccgaaaggttggtggttcgagcccacccagggacgcc

SEQ ID NO: 54681 - DNA, 43 bp, synthetic construct; identical to SEQ ID NO: 22936
  misc_feature 1..43: note = Probe
  source 1..43: mol_type = other DNA

SEQ ID NO: 54682 - DNA, 43 bp, synthetic construct; identical to SEQ ID NO: 7129
  misc_feature 1..43: note = Probe
  source 1..43: mol_type = other DNA

SEQ ID NO: 54683 - DNA, 35 bp, synthetic construct; identical to SEQ ID NO: 7139
  misc_feature 1..35: note = Probe
  source 1..35: mol_type = other DNA

SEQ ID NO: 54684 - DNA, 42 bp, synthetic construct; identical to SEQ ID NO: 1524
  misc_feature 1..42: note = Probe
  source 1..42: mol_type = other DNA

SEQ ID NO: 54685 - DNA, 43 bp, synthetic construct; identical to SEQ ID NO: 7143
  misc_feature 1..43: note = Probe
  source 1..43: mol_type = other DNA

SEQ ID NO: 54686 - DNA, 44 bp, synthetic construct; identical to SEQ ID NO: 22962
  misc_feature 1..44: note = Probe
  source 1..44: mol_type = other DNA

SEQ ID NO: 54687 - DNA, 50 bp, synthetic construct; identical to SEQ ID NO: 7145
  misc_feature 1..50: note = Probe
  source 1..50: mol_type = other DNA

SEQ ID NO: 54688 - DNA, 32 bp, synthetic construct; identical to SEQ ID NO: 14122
  misc_feature 1..32: note = Probe
  source 1..32: mol_type = other DNA

SEQ ID NO: 54689 - DNA, 32 bp, synthetic construct; identical to SEQ ID NO: 22966
  misc_feature 1..32: note = Probe
  source 1..32: mol_type = other DNA

SEQ ID NO: 54690 - DNA, 30 bp, synthetic construct; identical to SEQ ID NO: 14124
  misc_feature 1..30: note = Probe
  source 1..30: mol_type = other DNA

SEQ ID NO: 54691 - DNA, 24 bp, synthetic construct
  misc_feature 1..24: note = Probe
  source 1..24: mol_type = other DNA
gttcgattccccgacggggaggca

SEQ ID NO: 54692 - DNA, 24 bp, synthetic construct
  misc_feature 1..24: note = Probe
  source 1..24: mol_type = other DNA
gttcgattctcatagtcctagaaa

SEQ ID NO: 54693 - DNA, 26 bp, synthetic construct
  misc_feature 1..26: note = Probe
  source 1..26: mol_type = other DNA
gttcttgtagttgaaatacaacgatg

SEQ ID NO: 54694 - DNA, 27 bp, synthetic construct
  misc_feature 1..27: note = Probe
  source 1..27: mol_type = other DNA
gttcttgtagttgaaatacaacgatgg

SEQ ID NO: 54695 - DNA, 29 bp, synthetic construct
  misc_feature 1..29: note = Probe
  source 1..29: mol_type = other DNA
gttcttgtagttgaaatacaacgatggtt

SEQ ID NO: 54696 - DNA, 30 bp, synthetic construct; identical to SEQ ID NO: 7195
  misc_feature 1..30: note = Probe
  source 1..30: mol_type = other DNA

SEQ ID NO: 54697 - DNA, 36 bp, synthetic construct; identical to SEQ ID NO: 23017
  misc_feature 1..36: note = Probe
  source 1..36: mol_type = other DNA

SEQ ID NO: 54698 - DNA, 38 bp, synthetic construct; identical to SEQ ID NO: 7200
  misc_feature 1..38: note = Probe
  source 1..38: mol_type = other DNA

SEQ ID NO: 54699 - DNA, 39 bp, synthetic construct; identical to SEQ ID NO: 33415
  misc_feature 1..39: note = Probe
  source 1..39: mol_type = other DNA

SEQ ID NO: 54700 - DNA, 42 bp, synthetic construct; identical to SEQ ID NO: 7201
  misc_feature 1..42: note = Probe
  source 1..42: mol_type = other DNA

SEQ ID NO: 54701 - DNA, 46 bp, synthetic construct; identical to SEQ ID NO: 1528
  misc_feature 1..46: note = Probe
  source 1..46: mol_type = other DNA

SEQ ID NO: 54702 - DNA, 50 bp, synthetic construct; identical to SEQ ID NO: 1529
  misc_feature 1..50: note = Probe
  source 1..50: mol_type = other DNA

SEQ ID NO: 54703 - DNA, 34 bp, synthetic construct; identical to SEQ ID NO: 7208
  misc_feature 1..34: note = Probe
  source 1..34: mol_type = other DNA

SEQ ID NO: 54704 - DNA, 24 bp, synthetic construct
  misc_feature 1..24: note = Probe
  source 1..24: mol_type = other DNA
gttgtagtccgtgcgagaataatg

SEQ ID NO: 54705 - DNA, 25 bp, synthetic construct
  misc_feature 1..25: note = Probe
  source 1..25: mol_type = other DNA
gtttagacgggctcacatcacccca

SEQ ID NO: 54706 - DNA, 27 bp, synthetic construct
  misc_feature 1..27: note = Probe
  source 1..27: mol_type = other DNA
gtttagacgggctcacatcaccccata

SEQ ID NO: 54707 - DNA, 34 bp, synthetic construct; identical to SEQ ID NO: 7239
  misc_feature 1..34: note = Probe
  source 1..34: mol_type = other DNA

SEQ ID NO: 54708 - DNA, 30 bp, synthetic construct; identical to SEQ ID NO: 1536
  misc_feature 1..30: note = Probe
  source 1..30: mol_type = other DNA

SEQ ID NO: 54709 - DNA, 32 bp, synthetic construct; identical to SEQ ID NO: 7245
  misc_feature 1..32: note = Probe
  source 1..32: mol_type = other DNA

SEQ ID NO: 54710 - DNA, 35 bp, synthetic construct; identical to SEQ ID NO: 1539
  misc_feature 1..35: note = Probe
  source 1..35: mol_type = other DNA

SEQ ID NO: 54711 - DNA, 36 bp, synthetic construct; identical to SEQ ID NO: 1540
  misc_feature 1..36: note = Probe
  source 1..36: mol_type = other DNA

SEQ ID NO: 54712 - DNA, 37 bp, synthetic construct; identical to SEQ ID NO: 1541
  misc_feature 1..37: note = Probe
  source 1..37: mol_type = other DNA

SEQ ID NO: 54713 - DNA, 23 bp, synthetic construct
  misc_feature 1..23: note = Probe
  source 1..23: mol_type = other DNA
gtttccgtagtgtagcggttatc

SEQ ID NO: 54714 - DNA, 24 bp, synthetic construct
  misc_feature 1..24: note = Probe
  source 1..24: mol_type = other DNA
gtttccgtagtgtagcggttatca

SEQ ID NO: 54715 - DNA, 26 bp, synthetic construct
  misc_feature 1..26: note = Probe
  source 1..26: mol_type = other DNA
gtttccgtagtgtagcggttatcaca

SEQ ID NO: 54716 - DNA, 29 bp, synthetic construct
  misc_feature 1..29: note = Probe
  source 1..29: mol_type = other DNA
gtttccgtagtgtagcggttatcacattc

SEQ ID NO: 54717 - DNA, 30 bp, synthetic construct; identical to SEQ ID NO: 8769
  misc_feature 1..30: note = Probe
  source 1..30: mol_type = other DNA

SEQ ID NO: 54718 - DNA, 31 bp, synthetic construct; identical to SEQ ID NO: 1547
  misc_feature 1..31: note = Probe
  source 1..31: mol_type = other DNA

SEQ ID NO: 54719 - DNA, 32 bp, synthetic construct; identical to SEQ ID NO: 1548
  misc_feature 1..32: note = Probe
  source 1..32: mol_type = other DNA

SEQ ID NO: 54720 - DNA, 33 bp, synthetic construct; identical to SEQ ID NO: 1549
  misc_feature 1..33: note = Probe
  source 1..33: mol_type = other DNA

SEQ ID NO: 54721 - DNA, 50 bp, synthetic construct; identical to SEQ ID NO: 7255
  misc_feature 1..50: note = Probe
  source 1..50: mol_type = other DNA

SEQ ID NO: 54722 - DNA, 17 bp, synthetic construct
  misc_feature 1..17: note = Probe
  source 1..17: mol_type = other DNA
gtttccgtagtgtagtg

SEQ ID NO: 54723 - DNA, 23 bp, synthetic construct
  misc_feature 1..23: note = Probe
  source 1..23: mol_type = other DNA
gtttccgtagtgtagtggtcatc

SEQ ID NO: 54724 - DNA, 24 bp, synthetic construct
  misc_feature 1..24: note = Probe
  source 1..24: mol_type = other DNA
gtttccgtagtgtagtggtcatca

SEQ ID NO: 54725 - DNA, 33 bp, synthetic construct; identical to SEQ ID NO: 1561
  misc_feature 1..33: note = Probe
  source 1..33: mol_type = other DNA

SEQ ID NO: 54726 - DNA, 50 bp, synthetic construct; identical to SEQ ID NO: 7263
  misc_feature 1..50: note = Probe
  source 1..50: mol_type = other DNA

SEQ ID NO: 54727 - DNA, 22 bp, synthetic construct
  misc_feature 1..22: note = Probe
  source 1..22: mol_type = other DNA
gtttccgtagtgtagtggttat

SEQ ID NO: 54728 - DNA, 23 bp, synthetic construct
  misc_feature 1..23: note = Probe
  source 1..23: mol_type = other DNA
gtttccgtagtgtagtggttatc

SEQ ID NO: 54729 - DNA, 24 bp, synthetic construct
  misc_feature 1..24: note = Probe
  source 1..24: mol_type = other DNA
gtttccgtagtgtagtggttatca

SEQ ID NO: 54730 - DNA, 25 bp, synthetic construct
  misc_feature 1..25: note = Probe
  source 1..25: mol_type = other DNA
gtttccgtagtgtagtggttatcac

SEQ ID NO: 54731 - DNA, 26 bp, synthetic construct
  misc_feature 1..26: note = Probe
  source 1..26: mol_type = other DNA
gtttccgtagtgtagtggttatcacg

SEQ ID NO: 54732 - DNA, 27 bp, synthetic construct
  misc_feature 1..27: note = Probe
  source 1..27: mol_type = other DNA
gtttccgtagtgtagtggttatcacgt

SEQ ID NO: 54733 - DNA, 28 bp, synthetic construct
  misc_feature 1..28: note = Probe
  source 1..28: mol_type = other DNA
gtttccgtagtgtagtggttatcacgtt

SEQ ID NO: 54734 - DNA, 29 bp, synthetic construct
  misc_feature 1..29: note = Probe
  source 1..29: mol_type = other DNA
gtttccgtagtgtagtggttatcacgttc

SEQ ID NO: 54735 - DNA, 30 bp, synthetic construct; identical to SEQ ID NO: 7273
  misc_feature 1..30: note = Probe
  source 1..30: mol_type = other DNA

SEQ ID NO: 54736 - DNA, 31 bp, synthetic construct; identical to SEQ ID NO: 7274
  misc_feature 1..31: note = Probe
  source 1..31: mol_type = other DNA

SEQ ID NO: 54737 - DNA, 32 bp, synthetic construct; identical to SEQ ID NO: 7275
  misc_feature 1..32: note = Probe
  source 1..32: mol_type = other DNA

SEQ ID NO: 54738 - DNA, 33 bp, synthetic construct; identical to SEQ ID NO: 7276
  misc_feature 1..33: note = Probe
  source 1..33: mol_type = other DNA

SEQ ID NO: 54739 - DNA, 41 bp, synthetic construct; identical to SEQ ID NO: 23126
  misc_feature 1..41: note = Probe
  source 1..41: mol_type = other DNA

SEQ ID NO: 54740 - DNA, 42 bp, synthetic construct; identical to SEQ ID NO: 33531
  misc_feature 1..42: note = Probe
  source 1..42: mol_type = other DNA

SEQ ID NO: 54741 - DNA, 44 bp, synthetic construct
  misc_feature 1..44: note = Probe
  source 1..44: mol_type = other DNA
gtttccgtagtgtagtggttatcacgttcgcctaacacgcgaaa

SEQ ID NO: 54742 - DNA, 50 bp, synthetic construct; identical to SEQ ID NO: 7277
  misc_feature 1..50: note = Probe
  source 1..50: mol_type = other DNA

SEQ ID NO: 54743 - DNA, 34 bp, synthetic construct; identical to SEQ ID NO: 7278
  misc_feature 1..34: note = Probe
  source 1..34: mol_type = other DNA

SEQ ID NO: 54744 - DNA, 35 bp, synthetic construct; identical to SEQ ID NO: 7279
  misc_feature 1..35: note = Probe
  source 1..35: mol_type = other DNA

SEQ ID NO: 54745 - DNA, 37 bp, synthetic construct; identical to SEQ ID NO: 7281
  misc_feature 1..37: note = Probe
  source 1..37: mol_type = other DNA

SEQ ID NO: 54746 - DNA, 38 bp, synthetic construct; identical to SEQ ID NO: 1563
  misc_feature 1..38: note = Probe
  source 1..38: mol_type = other DNA

SEQ ID NO: 54747 - DNA, 40 bp, synthetic construct; identical to SEQ ID NO: 14160
  misc_feature 1..40: note = Probe
  source 1..40: mol_type = other DNA

SEQ ID NO: 54748 - DNA, 41 bp, synthetic construct; identical to SEQ ID NO: 23134
  misc_feature 1..41: note = Probe
  source 1..41: mol_type = other DNA

SEQ ID NO: 54749 - DNA, 42 bp, synthetic construct; identical to SEQ ID NO: 23135
  misc_feature 1..42: note = Probe
  source 1..42: mol_type = other DNA

SEQ ID NO: 54750 - DNA, 49 bp, synthetic construct; identical to SEQ ID NO: 14161
  misc_feature 1..49: note = Probe
  source 1..49: mol_type = other DNA

SEQ ID NO: 54751 - DNA, 23 bp, synthetic construct
  misc_feature 1..23: note = Probe
  source 1..23: mol_type = other DNA
gtttccgtagtgtagtggttatt

SEQ ID NO: 54752 - DNA, 15 bp, synthetic construct
  misc_feature 1..15: note = Probe
  source 1..15: mol_type = other DNA
gtttgtgggtttaag

SEQ ID NO: 54753 - DNA, 17 bp, synthetic construct
  misc_feature 1..17: note = Probe
  source 1..17: mol_type = other DNA
gtttgtgggtttaagtc

SEQ ID NO: 54754 - DNA, 18 bp, synthetic construct
  misc_feature 1..18: note = Probe
  source 1..18: mol_type = other DNA
gtttgtgggtttaagtcc

SEQ ID NO: 54755 - DNA, 22 bp, synthetic construct
  misc_feature 1..22: note = Probe
  source 1..22: mol_type = other DNA
gtttgtgggtttaagtcccatt

SEQ ID NO: 54756 - DNA, 23 bp, synthetic construct
  misc_feature 1..23: note = Probe
  source 1..23: mol_type = other DNA
gtttgtgggtttaagtcccattg

SEQ ID NO: 54757 - DNA, 24 bp, synthetic construct
  misc_feature 1..24: note = Probe
  source 1..24: mol_type = other DNA
gtttgtgggtttaagtcccattgg

SEQ ID NO: 54758 - DNA, 25 bp, synthetic construct
  misc_feature 1..25: note = Probe
  source 1..25: mol_type = other DNA
gtttgtgggtttaagtcccattggt

SEQ ID NO: 54759 - DNA, 26 bp, synthetic construct
  misc_feature 1..26: note = Probe
  source 1..26: mol_type = other DNA
gtttgtgggtttaagtcccattggtc

SEQ ID NO: 54760 - DNA, 27 bp, synthetic construct
  misc_feature 1..27: note = Probe
  source 1..27: mol_type = other DNA
gtttgtgggtttaagtcccattggtct

SEQ ID NO: 54761 - DNA, 28 bp, synthetic construct
  misc_feature 1..28: note = Probe
  source 1..28: mol_type = other DNA
gtttgtgggtttaagtcccattggtcta

SEQ ID NO: 54762 - DNA, 29 bp, synthetic construct
  misc_feature 1..29: note = Probe
  source 1..29: mol_type = other DNA
gtttgtgggtttaagtcccattggtctag

SEQ ID NO: 54763 - DNA, 30 bp, synthetic construct; identical to SEQ ID NO: 7300
  misc_feature 1..30: note = Probe
  source 1..30: mol_type = other DNA

SEQ ID NO: 54764 - DNA, 31 bp, synthetic construct; identical to SEQ ID NO: 7301
  misc_feature 1..31: note = Probe
  source 1..31: mol_type = other DNA

SEQ ID NO: 54765 - DNA, 32 bp, synthetic construct; identical to SEQ ID NO: 7302
  misc_feature 1..32: note = Probe
  source 1..32: mol_type = other DNA

SEQ ID NO: 54766 - DNA, 33 bp, synthetic construct; identical to SEQ ID NO: 7303
  misc_feature 1..33: note = Probe
  source 1..33: mol_type = other DNA

SEQ ID NO: 54767 - DNA, 34 bp, synthetic construct; identical to SEQ ID NO: 7304
  misc_feature 1..34: note = Probe
  source 1..34: mol_type = other DNA

SEQ ID NO: 54768 - DNA, 19 bp, synthetic construct
  misc_feature 1..19: note = Probe
  source 1..19: mol_type = other DNA
gttttcacccaggcggccc

SEQ ID NO: 54769 - DNA, 46 bp, synthetic construct; identical to SEQ ID NO: 7307
  misc_feature 1..46: note = Probe
  source 1..46: mol_type = other DNA

SEQ ID NO: 54770 - DNA, 36 bp, synthetic construct; identical to SEQ ID NO: 7311
  misc_feature 1..36: note = Probe
  source 1..36: mol_type = other DNA

SEQ ID NO: 54771 - DNA, 38 bp, synthetic construct; identical to SEQ ID NO: 7312
  misc_feature 1..38: note = Probe
  source 1..38: mol_type = other DNA

SEQ ID NO: 54772 - DNA, 39 bp, synthetic construct; identical to SEQ ID NO: 7313
  misc_feature 1..39: note = Probe
  source 1..39: mol_type = other DNA

SEQ ID NO: 54773 - DNA, 40 bp, synthetic construct; identical to SEQ ID NO: 23177
  misc_feature 1..40: note = Probe
  source 1..40: mol_type = other DNA

SEQ ID NO: 54774 - DNA, 43 bp, synthetic construct; identical to SEQ ID NO: 7315
  misc_feature 1..43: note = Probe
  source 1..43: mol_type = other DNA

SEQ ID NO: 54775 - DNA, 32 bp, synthetic construct; identical to SEQ ID NO: 23182
  misc_feature 1..32: note = Probe
  source 1..32: mol_type = other DNA

SEQ ID NO: 54776 - DNA, 36 bp, synthetic construct; identical to SEQ ID NO: 23185
  misc_feature 1..36: note = Probe
  source 1..36: mol_type = other DNA

SEQ ID NO: 54777 - DNA, 37 bp, synthetic construct; identical to SEQ ID NO: 7317
  misc_feature 1..37: note = Probe
  source 1..37: mol_type = other DNA

SEQ ID NO: 54778 - DNA, 39 bp, synthetic construct; identical to SEQ ID NO: 7318
  misc_feature 1..39: note = Probe
  source 1..39: mol_type = other DNA

SEQ ID NO: 54779 - DNA, 50 bp, synthetic construct; identical to SEQ ID NO: 7321
  misc_feature 1..50: note = Probe
  source 1..50: mol_type = other DNA

SEQ ID NO: 54780 - DNA, 36 bp, synthetic construct; identical to SEQ ID NO: 7329
  misc_feature 1..36: note = Probe
  source 1..36: mol_type = other DNA

SEQ ID NO: 54781 - DNA, 28 bp, synthetic construct
  misc_feature 1..28: note = Probe
  source 1..28: mol_type = other DNA
taaacctagccccaaacccactccacct

SEQ ID NO: 54782 - DNA, 33 bp, synthetic construct; identical to SEQ ID NO: 23198
  misc_feature 1..33: note = Probe
  source 1..33: mol_type = other DNA

SEQ ID NO: 54783 - DNA, 35 bp, synthetic construct; identical to SEQ ID NO: 23201
  misc_feature 1..35: note = Probe
  source 1..35: mol_type = other DNA

SEQ ID NO: 54784 - DNA, 38 bp, synthetic construct; identical to SEQ ID NO: 7332
  misc_feature 1..38: note = Probe
  source 1..38: mol_type = other DNA

SEQ ID NO: 54785 - DNA, 32 bp, synthetic construct; identical to SEQ ID NO: 7337
  misc_feature 1..32: note = Probe
  source 1..32: mol_type = other DNA

SEQ ID NO: 54786 - DNA, 33 bp, synthetic construct; identical to SEQ ID NO: 7338
  misc_feature 1..33: note = Probe
  source 1..33: mol_type = other DNA

SEQ ID NO: 54787 - DNA, 26 bp, synthetic construct
  misc_feature 1..26: note = Probe
  source 1..26: mol_type = other DNA
taacacaaagcacccaacttacactt

SEQ ID NO: 54788 - DNA, 30 bp, synthetic construct; identical to SEQ ID NO: 7355
  misc_feature 1..30: note = Probe
  source 1..30: mol_type = other DNA

SEQ ID NO: 54789 - DNA, 31 bp, synthetic construct; identical to SEQ ID NO: 23224
  misc_feature 1..31: note = Probe
  source 1..31: mol_type = other DNA

SEQ ID NO: 54790 - DNA, 32 bp, synthetic construct; identical to SEQ ID NO: 7356
  misc_feature 1..32: note = Probe
  source 1..32: mol_type = other DNA

SEQ ID NO: 54791 - DNA, 33 bp, synthetic construct; identical to SEQ ID NO: 23226
  misc_feature 1..33: note = Probe
  source 1..33: mol_type = other DNA

SEQ ID NO: 54792 - DNA, 50 bp, synthetic construct; identical to SEQ ID NO: 1568
  misc_feature 1..50: note = Probe
  source 1..50: mol_type = other DNA

SEQ ID NO: 54793 - DNA, 22 bp, synthetic construct
  misc_feature 1..22: note = Probe
  source 1..22: mol_type = other DNA
taacacgcgaaaggtccccggt

SEQ ID NO: 54794 - DNA, 30 bp, synthetic construct; identical to SEQ ID NO: 7365
  misc_feature 1..30: note = Probe
  source 1..30: mol_type = other DNA

SEQ ID NO: 54795 - DNA, 31 bp, synthetic construct; identical to SEQ ID NO: 7366
  misc_feature 1..31: note = Probe
  source 1..31: mol_type = other DNA

SEQ ID NO: 54796 - DNA, 32 bp, synthetic construct; identical to SEQ ID NO: 7367
  misc_feature 1..32: note = Probe
  source 1..32: mol_type = other DNA

SEQ ID NO: 54797 - DNA, 33 bp, synthetic construct; identical to SEQ ID NO: 7368
  misc_feature 1..33: note = Probe
  source 1..33: mol_type = other DNA

SEQ ID NO: 54798 - DNA, 34 bp, synthetic construct; identical to SEQ ID NO: 23249
  misc_feature 1..34: note = Probe
  source 1..34: mol_type = other DNA

SEQ ID NO: 54799 - DNA, 35 bp, synthetic construct; identical to SEQ ID NO: 23250
  misc_feature 1..35: note = Probe
  source 1..35: mol_type = other DNA

SEQ ID NO: 54800 - DNA, 36 bp, synthetic construct; identical to SEQ ID NO: 23251
  misc_feature 1..36: note = Probe
  source 1..36: mol_type = other DNA

SEQ ID NO: 54801 - DNA, 37 bp, synthetic construct; identical to SEQ ID NO: 7369
  misc_feature 1..37: note = Probe
  source 1..37: mol_type = other DNA

SEQ ID NO: 54802 - DNA, 38 bp, synthetic construct; identical to SEQ ID NO: 7370
  misc_feature 1..38: note = Probe
  source 1..38: mol_type = other DNA

SEQ ID NO: 54803 - DNA, 39 bp, synthetic construct; identical to SEQ ID NO: 7371
  misc_feature 1..39: note = Probe
  source 1..39: mol_type = other DNA

SEQ ID NO: 54804 - DNA, 40 bp, synthetic construct; identical to SEQ ID NO: 7372
  misc_feature 1..40: note = Probe
  source 1..40: mol_type = other DNA

SEQ ID NO: 54805 - DNA, 44 bp, synthetic construct
  misc_feature 1..44: note = Probe
  source 1..44: mol_type = other DNA
taaccaaaacatcagattgtgaatctgacaacagaggcttacga

SEQ ID NO: 54806 - DNA, 41 bp, synthetic construct; identical to SEQ ID NO: 7376
  misc_feature 1..41: note = Probe
  source 1..41: mol_type = other DNA

SEQ ID NO: 54807 - DNA, 40 bp, synthetic construct; identical to SEQ ID NO: 7377
  misc_feature 1..40: note = Probe
  source 1..40: mol_type = other DNA

SEQ ID NO: 54808 - DNA, 36 bp, synthetic construct; identical to SEQ ID NO: 50114
  misc_feature 1..36: note = Probe
  source 1..36: mol_type = other DNA

SEQ ID NO: 54809 - DNA, 40 bp, synthetic construct; identical to SEQ ID NO: 1570
  misc_feature 1..40: note = Probe
  source 1..40: mol_type = other DNA

SEQ ID NO: 54810 - DNA, 41 bp, synthetic construct; identical to SEQ ID NO: 7378
  misc_feature 1..41: note = Probe
  source 1..41: mol_type = other DNA

SEQ ID NO: 54811 - DNA, 40 bp, synthetic construct; identical to SEQ ID NO: 50118
  misc_feature 1..40: note = Probe
  source 1..40: mol_type = other DNA

SEQ ID NO: 54812 - DNA, 40 bp, synthetic construct; identical to SEQ ID NO: 50119
  misc_feature 1..40: note = Probe
  source 1..40: mol_type = other DNA

SEQ ID NO: 54813 - DNA, 50 bp, synthetic construct; identical to SEQ ID NO: 7379
  misc_feature 1..50: note = Probe
  source 1..50: mol_type = other DNA

SEQ ID NO: 54814 - DNA, 41 bp, synthetic construct; identical to SEQ ID NO: 7382
  misc_feature 1..41: note = Probe
  source 1..41: mol_type = other DNA

SEQ ID NO: 54815 - DNA, 32 bp, synthetic construct; identical to SEQ ID NO: 7387
  misc_feature 1..32: note = Probe
  source 1..32: mol_type = other DNA

SEQ ID NO: 54816 - DNA, 33 bp, synthetic construct; identical to SEQ ID NO: 7388
  misc_feature 1..33: note = Probe
  source 1..33: mol_type = other DNA

SEQ ID NO: 54817 - DNA, 34 bp, synthetic construct; identical to SEQ ID NO: 7389
  misc_feature 1..34: note = Probe
  source 1..34: mol_type = other DNA

SEQ ID NO: 54818 - DNA, 35 bp, synthetic construct; identical to SEQ ID NO: 7390
  misc_feature 1..35: note = Probe
  source 1..35: mol_type = other DNA

SEQ ID NO: 54819 - DNA, 36 bp, synthetic construct; identical to SEQ ID NO: 7391
  misc_feature 1..36: note = Probe
  source 1..36: mol_type = other DNA

SEQ ID NO: 54820 - DNA, 37 bp, synthetic construct; identical to SEQ ID NO: 7392
  misc_feature 1..37: note = Probe
  source 1..37: mol_type = other DNA

SEQ ID NO: 54821 - DNA, 38 bp, synthetic construct; identical to SEQ ID NO: 7393
  misc_feature 1..38: note = Probe
  source 1..38: mol_type = other DNA

SEQ ID NO: 54822 - DNA, 39 bp, synthetic construct; identical to SEQ ID NO: 7394
  misc_feature 1..39: note = Probe
  source 1..39: mol_type = other DNA

SEQ ID NO: 54823 - DNA, 40 bp, synthetic construct; identical to SEQ ID NO: 7395
  misc_feature 1..40: note = Probe
  source 1..40: mol_type = other DNA

SEQ ID NO: 54824 - DNA, 41 bp, synthetic construct; identical to SEQ ID NO: 7396
  misc_feature 1..41: note = Probe
  source 1..41: mol_type = other DNA

SEQ ID NO: 54825 - DNA, 42 bp, synthetic construct; identical to SEQ ID NO: 23277
  misc_feature 1..42: note = Probe
  source 1..42: mol_type = other DNA

SEQ ID NO: 54826 - DNA, 46 bp, synthetic construct; identical to SEQ ID NO: 7399
  misc_feature 1..46: note = Probe
  source 1..46: mol_type = other DNA

SEQ ID NO: 54827 - DNA, 20 bp, synthetic construct
  misc_feature 1..20: note = Probe
  source 1..20: mol_type = other DNA
taacttgaccgctctgagct

SEQ ID NO: 54828 - DNA, 31 bp, synthetic construct; identical to SEQ ID NO: 7406
  misc_feature 1..31: note = Probe
  source 1..31: mol_type = other DNA

SEQ ID NO: 54829 - DNA, 32 bp, synthetic construct
  misc_feature 1..32: note = Probe
  source 1..32: mol_type = other DNA
taagcatagctgccttccaagcagttgacccg

SEQ ID NO: 54830 - DNA, 41 bp, synthetic construct; identical to SEQ ID NO: 7411
  misc_feature 1..41: note = Probe
  source 1..41: mol_type = other DNA

SEQ ID NO: 54831 - DNA, 19 bp, synthetic construct
  misc_feature 1..19: note = Probe
  source 1..19: mol_type = other DNA
taagctatcgggcccatac

SEQ ID NO: 54832 - DNA, 21 bp, synthetic construct
  misc_feature 1..21: note = Probe
  source 1..21: mol_type = other DNA
taagctatcgggcccataccc

SEQ ID NO: 54833 - DNA, 23 bp, synthetic construct
  misc_feature 1..23: note = Probe
  source 1..23: mol_type = other DNA
taagctatcgggcccataccccg

SEQ ID NO: 54834 - DNA, 24 bp, synthetic construct
  misc_feature 1..24: note = Probe
  source 1..24: mol_type = other DNA
taagctatcgggcccataccccga

SEQ ID NO: 54835 - DNA, 25 bp, synthetic construct
  misc_feature 1..25: note = Probe
  source 1..25: mol_type = other DNA
taagctatcgggcccataccccgaa

SEQ ID NO: 54836 - DNA, 26 bp, synthetic construct
  misc_feature 1..26: note = Probe
  source 1..26: mol_type = other DNA
taagctatcgggcccataccccgaaa

SEQ ID NO: 54837 - DNA, 27 bp, synthetic construct
  misc_feature 1..27: note = Probe
  source 1..27: mol_type = other DNA
taagctatcgggcccataccccgaaaa

SEQ ID NO: 54838 - DNA, 28 bp, synthetic construct
  misc_feature 1..28: note = Probe
  source 1..28: mol_type = other DNA
taagctatcgggcccataccccgaaaat

SEQ ID NO: 54839 - DNA, 29 bp, synthetic construct
  misc_feature 1..29: note = Probe
  source 1..29: mol_type = other DNA
taagctatcgggcccataccccgaaaatg

SEQ ID NO: 54840 - DNA, 30 bp, synthetic construct; identical to SEQ ID NO: 7423
  misc_feature 1..30: note = Probe
  source 1..30: mol_type = other DNA

SEQ ID NO: 54841 - DNA, 31 bp, synthetic construct; identical to SEQ ID NO: 7424
  misc_feature 1..31: note = Probe
  source 1..31: mol_type = other DNA

SEQ ID NO: 54842 - DNA, 32 bp, synthetic construct; identical to SEQ ID NO: 7425
  misc_feature 1..32: note = Probe
  source 1..32: mol_type = other DNA

SEQ ID NO: 54843 - DNA, 33 bp, synthetic construct; identical to SEQ ID NO: 7426
  misc_feature 1..33: note = Probe
  source 1..33: mol_type = other DNA

SEQ ID NO: 54844 - DNA, 35 bp, synthetic construct; identical to SEQ ID NO: 7428
  misc_feature 1..35: note = Probe
  source 1..35: mol_type = other DNA

SEQ ID NO: 54845 - DNA, 36 bp, synthetic construct; identical to SEQ ID NO: 7429
  misc_feature 1..36: note = Probe
  source 1..36: mol_type = other DNA

SEQ ID NO: 54846 - DNA, 50 bp, synthetic construct; identical to SEQ ID NO: 1573
  misc_feature 1..50: note = Probe
  source 1..50: mol_type = other DNA

SEQ ID NO: 54847 - DNA, 32 bp, synthetic construct; identical to SEQ ID NO: 7441
  misc_feature 1..32: note = Probe
  source 1..32: mol_type = other DNA

SEQ ID NO: 54848 - DNA, 33 bp, synthetic construct; identical to SEQ ID NO: 7442
  misc_feature 1..33: note = Probe
  source 1..33: mol_type = other DNA

SEQ ID NO: 54849 - DNA, 43 bp, synthetic construct; identical to SEQ ID NO: 7449
  misc_feature 1..43: note = Probe
  source 1..43: mol_type = other DNA

SEQ ID NO: 54850 - DNA, 44 bp, synthetic construct; identical to SEQ ID NO: 7450
  misc_feature 1..44: note = Probe
  source 1..44: mol_type = other DNA

SEQ ID NO: 54851 - DNA, 45 bp, synthetic construct; identical to SEQ ID NO: 7451
  misc_feature 1..45: note = Probe
  source 1..45: mol_type = other DNA

SEQ ID NO: 54852 - DNA, 46 bp, synthetic construct; identical to SEQ ID NO: 7452
  misc_feature 1..46: note = Probe
  source 1..46: mol_type = other DNA

SEQ ID NO: 54853 - DNA, 30 bp, synthetic construct; identical to SEQ ID NO: 23324
  misc_feature 1..30: note = Probe
  source 1..30: mol_type = other DNA

SEQ ID NO: 54854 - DNA, 32 bp, synthetic construct; identical to SEQ ID NO: 7457
  misc_feature 1..32: note = Probe
  source 1..32: mol_type = other DNA

SEQ ID NO: 54855 - DNA, 22 bp, synthetic construct
  misc_feature 1..22: note = Probe
  source 1..22: mol_type = other DNA
taataacgccaaggtcgcgggt

SEQ ID NO: 54856 - DNA, 23 bp, synthetic construct
  misc_feature 1..23: note = Probe
  source 1..23: mol_type = other DNA
taataacgccaaggtcgcgggtt

SEQ ID NO: 54857 - DNA, 50 bp, synthetic construct; identical to SEQ ID NO: 7462
  misc_feature 1..50: note = Probe
  source 1..50: mol_type = other DNA

SEQ ID NO: 54858 - DNA, 50 bp, synthetic construct; identical to SEQ ID NO: 7464
  misc_feature 1..50: note = Probe
  source 1..50: mol_type = other DNA

SEQ ID NO: 54859 - DNA, 22 bp, synthetic construct
  misc_feature 1..22: note = Probe
  source 1..22: mol_type = other DNA
taatctgagggtccagggttca

SEQ ID NO: 54860 - DNA, 15 bp, synthetic construct
  misc_feature 1..15: note = Probe
  source 1..15: mol_type = other DNA
tacaatctccagcat

SEQ ID NO: 54861 - DNA, 24 bp, synthetic construct
  misc_feature 1..24: note = Probe
  source 1..24: mol_type = other DNA
tacaatctccagcattccccctca

SEQ ID NO: 54862 - DNA, 29 bp, synthetic construct
  misc_feature 1..29: note = Probe
  source 1..29: mol_type = other DNA
tacaatctccagcattccccctcaaacct

SEQ ID NO: 54863 - DNA, 30 bp, synthetic construct; identical to SEQ ID NO: 7478
  misc_feature 1..30: note = Probe
  source 1..30: mol_type = other DNA

SEQ ID NO: 54864 - DNA, 50 bp, synthetic construct; identical to SEQ ID NO: 7482
  misc_feature 1..50: note = Probe
  source 1..50: mol_type = other DNA

SEQ ID NO: 54865 - DNA, 32 bp, synthetic construct; identical to SEQ ID NO: 7488
  misc_feature 1..32: note = Probe
  source 1..32: mol_type = other DNA

SEQ ID NO: 54866 - DNA, 39 bp, synthetic construct; identical to SEQ ID NO: 7495
  misc_feature 1..39: note = Probe
  source 1..39: mol_type = other DNA

SEQ ID NO: 54867 - DNA, 40 bp, synthetic construct; identical to SEQ ID NO: 7496
  misc_feature 1..40: note = Probe
  source 1..40: mol_type = other DNA

SEQ ID NO: 54868 - DNA, 41 bp, synthetic construct; identical to SEQ ID NO: 7497
  misc_feature 1..41: note = Probe
  source 1..41: mol_type = other DNA

SEQ ID NO: 54869 - DNA, 42 bp, synthetic construct; identical to SEQ ID NO: 7498
  misc_feature 1..42: note = Probe
  source 1..42: mol_type = other DNA

SEQ ID NO: 54870 - DNA, 26 bp, synthetic construct
  misc_feature 1..26: note = Probe
  source 1..26: mol_type = other DNA
tacagtcagaggttcaattcctcttc

SEQ ID NO: 54871 - DNA, 27 bp, synthetic construct
  misc_feature 1..27: note = Probe
  source 1..27: mol_type = other DNA
tacagtcagaggttcaattcctcttct

SEQ ID NO: 54872 - DNA, 28 bp, synthetic construct
  misc_feature 1..28: note = Probe
  source 1..28: mol_type = other DNA
tacagtcagaggttcaattcctcttctt

SEQ ID NO: 54873 - DNA, 29 bp, synthetic construct
  misc_feature 1..29: note = Probe
  source 1..29: mol_type = other DNA
tacagtcagaggttcaattcctcttctta

SEQ ID NO: 54874 - DNA, 32 bp, synthetic construct; identical to SEQ ID NO: 7506
  misc_feature 1..32: note = Probe
  source 1..32: mol_type = other DNA

SEQ ID NO: 54875 - DNA, 35 bp, synthetic construct
  misc_feature 1..35: note = Probe
  source 1..35: mol_type = other DNA
tacagtcagaggttcaattcctcttcttaacaaca

SEQ ID NO: 54876 - DNA, 28 bp, synthetic construct
  misc_feature 1..28: note = Probe
  source 1..28: mol_type = other DNA
tacccacacccacccaagaacagggttt

SEQ ID NO: 54877 - DNA, 29 bp, synthetic construct
  misc_feature 1..29: note = Probe
  source 1..29: mol_type = other DNA
tacccacacccacccaagaacagggtttg

SEQ ID NO: 54878 - DNA, 30 bp, synthetic construct; identical to SEQ ID NO: 7510
  misc_feature 1..30: note = Probe
  source 1..30: mol_type = other DNA

SEQ ID NO: 54879 - DNA, 31 bp, synthetic construct; identical to SEQ ID NO: 7511
  misc_feature 1..31: note = Probe
  source 1..31: mol_type = other DNA

SEQ ID NO: 54880 - DNA, 32 bp, synthetic construct; identical to SEQ ID NO: 7512
  misc_feature 1..32: note = Probe
  source 1..32: mol_type = other DNA

SEQ ID NO: 54881 - DNA, 33 bp, synthetic construct; identical to SEQ ID NO: 23384
  misc_feature 1..33: note = Probe
  source 1..33: mol_type = other DNA

SEQ ID NO: 54882 - DNA, 31 bp, synthetic construct; identical to SEQ ID NO: 7516
  misc_feature 1..31: note = Probe
  source 1..31: mol_type = other DNA

SEQ ID NO: 54883 - DNA, 33 bp, synthetic construct; identical to SEQ ID NO: 7518
  misc_feature 1..33: note = Probe
  source 1..33: mol_type = other DNA

SEQ ID NO: 54884 - DNA, 35 bp, synthetic construct; identical to SEQ ID NO: 1576
  misc_feature 1..35: note = Probe
  source 1..35: mol_type = other DNA

SEQ ID NO: 54885 - DNA, 36 bp, synthetic construct; identical to SEQ ID NO: 1577
  misc_feature 1..36: note = Probe
  source 1..36: mol_type = other DNA

SEQ ID NO: 54886 - DNA, 39 bp, synthetic construct; identical to SEQ ID NO: 7520
  misc_feature 1..39: note = Probe
  source 1..39: mol_type = other DNA

SEQ ID NO: 54887 - DNA, 50 bp, synthetic construct; identical to SEQ ID NO: 7523
  misc_feature 1..50: note = Probe
  source 1..50: mol_type = other DNA

SEQ ID NO: 54888 - DNA, 16 bp, synthetic construct
  misc_feature 1..16: note = Probe
  source 1..16: mol_type = other DNA
tacctcctcaaagcaa

SEQ ID NO: 54889 - DNA, 17 bp, synthetic construct
  misc_feature 1..17: note = Probe
  source 1..17: mol_type = other DNA
tacctcctcaaagcaat

SEQ ID NO: 54890 - DNA, 19 bp, synthetic construct
  misc_feature 1..19: note = Probe
  source 1..19: mol_type = other DNA
tacctcctcaaagcaatac

SEQ ID NO: 54891 - DNA, 20 bp, synthetic construct
  misc_feature 1..20: note = Probe
  source 1..20: mol_type = other DNA
tacctcctcaaagcaataca

SEQ ID NO: 54892 - DNA, 23 bp, synthetic construct
  misc_feature 1..23: note = Probe
  source 1..23: mol_type = other DNA
tacctcctcaaagcaatacactg

SEQ ID NO: 54893 - DNA, 24 bp, synthetic construct
  misc_feature 1..24: note = Probe
  source 1..24: mol_type = other DNA
tacctcctcaaagcaatacactga

SEQ ID NO: 54894 - DNA, 45 bp, synthetic construct; identical to SEQ ID NO: 7533
  misc_feature 1..45: note = Probe
  source 1..45: mol_type = other DNA

SEQ ID NO: 54895 - DNA, 46 bp, synthetic construct
  misc_feature 1..46: note = Probe
  source 1..46: mol_type = other DNA
tacctcctcaaagcaatacactgaaaatgtttagacgggctcacat

SEQ ID NO: 54896 - DNA, 50 bp, synthetic construct; identical to SEQ ID NO: 1579
  misc_feature 1..50: note = Probe
  source 1..50: mol_type = other DNA

SEQ ID NO: 54897 - DNA, 22 bp, synthetic construct
  misc_feature 1..22: note = Probe
  source 1..22: mol_type = other DNA
tactctgcgttgtggccgcagc

SEQ ID NO: 54898 - DNA, 23 bp, synthetic construct
  misc_feature 1..23: note = Probe
  source 1..23: mol_type = other DNA
tactctgcgttgtggccgcagca

SEQ ID NO: 54899 - DNA, 48 bp, synthetic construct
  misc_feature 1..48: note = Probe
  source 1..48: mol_type = other DNA
tactttgatagagtaaataataggagcttaaacccccttatttctagg

SEQ ID NO: 54900 - DNA, 50 bp, synthetic construct; identical to SEQ ID NO: 7535
  misc_feature 1..50: note = Probe
  source 1..50: mol_type = other DNA

SEQ ID NO: 54901 - DNA, 21 bp, synthetic construct
  misc_feature 1..21: note = Probe
  source 1..21: mol_type = other DNA
tagaattctcgcctgccacgc

SEQ ID NO: 54902 - DNA, 24 bp, synthetic construct
  misc_feature 1..24: note = Probe
  source 1..24: mol_type = other DNA
tagacgggctcacatcaccccata

SEQ ID NO: 54903 - DNA, 31 bp, synthetic construct; identical to SEQ ID NO: 7543
  misc_feature 1..31: note = Probe
  source 1..31: mol_type = other DNA

SEQ ID NO: 54904 - DNA, 23 bp, synthetic construct
  misc_feature 1..23: note = Probe
  source 1..23: mol_type = other DNA
tagagcatgagactcttaatctc

SEQ ID NO: 54905 - DNA, 23 bp, synthetic construct
  misc_feature 1..23: note = Probe
  source 1..23: mol_type = other DNA
tagagcatgggactcttaatccc

SEQ ID NO: 54906 - DNA, 40 bp, synthetic construct; identical to SEQ ID NO: 7551
  misc_feature 1..40: note = Probe
  source 1..40: mol_type = other DNA

SEQ ID NO: 54907 - DNA, 41 bp, synthetic construct; identical to SEQ ID NO: 7552
  misc_feature 1..41: note = Probe
  source 1..41: mol_type = other DNA

SEQ ID NO: 54908 - DNA, 50 bp, synthetic construct; identical to SEQ ID NO: 1582
  misc_feature 1..50: note = Probe
  source 1..50: mol_type = other DNA

SEQ ID NO: 54909 - DNA, 31 bp, synthetic construct; identical to SEQ ID NO: 23447
  misc_feature 1..31: note = Probe
  source 1..31: mol_type = other DNA

SEQ ID NO: 54910 - DNA, 49 bp, synthetic construct; identical to SEQ ID NO: 1585
  misc_feature 1..49: note = Probe
  source 1..49: mol_type = other DNA

SEQ ID NO: 54911 - DNA, 22 bp, synthetic construct
  misc_feature 1..22: note = Probe
  source 1..22: mol_type = other DNA
tagccccaaacccactccacct

SEQ ID NO: 54912 - DNA, 27 bp, synthetic construct
  misc_feature 1..27: note = Probe
  source 1..27: mol_type = other DNA
tagcggttaggattcctggttttcacc

SEQ ID NO: 54913 - DNA, 36 bp, synthetic construct
  misc_feature 1..36: note = Probe
  source 1..36: mol_type = other DNA
tagcggttaggattcctggttttcacccaggcggcc

SEQ ID NO: 54914 - DNA, 38 bp, synthetic construct; identical to SEQ ID NO: 23458
  misc_feature 1..38: note = Probe
  source 1..38: mol_type = other DNA

SEQ ID NO: 54915 - DNA, 37 bp, synthetic construct
  misc_feature 1..37: note = Probe
  source 1..37: mol_type = other DNA
tagcggttaggattcctggttttcacccaggtggccc

SEQ ID NO: 54916 - DNA, 24 bp, synthetic construct
  misc_feature 1..24: note = Probe
  source 1..24: mol_type = other DNA
tagctcagtcggtagagcatcaga

SEQ ID NO: 54917 - DNA, 22 bp, synthetic construct
  misc_feature 1..22: note = Probe
  source 1..22: mol_type = other DNA
tagctcagtcggtagagcatga

SEQ ID NO: 54918 - DNA, 24 bp, synthetic construct
  misc_feature 1..24: note = Probe
  source 1..24: mol_type = other DNA
tagctcagtcggtagagcatgaga

SEQ ID NO: 54919 - DNA, 27 bp, synthetic construct
  misc_feature 1..27: note = Probe
  source 1..27: mol_type = other DNA
tagctcagtcggtagagcatgagactc

SEQ ID NO: 54920 - DNA, 25 bp, synthetic construct
  misc_feature 1..25: note = Probe
  source 1..25: mol_type = other DNA
tagctcagtcggtagagcatgggac

SEQ ID NO: 54921 - DNA, 26 bp, synthetic construct
  misc_feature 1..26: note = Probe
  source 1..26: mol_type = other DNA
tagctcagtcggtagagcatgggact

SEQ ID NO: 54922 - DNA, 27 bp, synthetic construct
  misc_feature 1..27: note = Probe
  source 1..27: mol_type = other DNA
tagctcagtcggtagagcatgggactc

SEQ ID NO: 54923 - DNA, 35 bp, synthetic construct; identical to SEQ ID NO: 7579
  misc_feature 1..35: note = Probe
  source 1..35: mol_type = other DNA

SEQ ID NO: 54924 - DNA, 21 bp, synthetic construct
  misc_feature 1..21: note = Probe
  source 1..21: mol_type = other DNA
taggatggggtgtgataggtg

SEQ ID NO: 54925 - DNA, 30 bp, synthetic construct; identical to SEQ ID NO: 1592
  misc_feature 1..30: note = Probe
  source 1..30: mol_type = other DNA

SEQ ID NO: 54926 - DNA, 34 bp, synthetic construct; identical to SEQ ID NO: 7586
  misc_feature 1..34: note = Probe
  source 1..34: mol_type = other DNA

SEQ ID NO: 54927 - DNA, 35 bp, synthetic construct; identical to SEQ ID NO: 7587
  misc_feature 1..35: note = Probe
  source 1..35: mol_type = other DNA

SEQ ID NO: 54928 - DNA, 36 bp, synthetic construct; identical to SEQ ID NO: 1595
  misc_feature 1..36: note = Probe
  source 1..36: mol_type = other DNA

SEQ ID NO: 54929 - DNA, 37 bp, synthetic construct; identical to SEQ ID NO: 7588
  misc_feature 1..37: note = Probe
  source 1..37: mol_type = other DNA

SEQ ID NO: 54930 - DNA, 38 bp, synthetic construct; identical to SEQ ID NO: 23494
  misc_feature 1..38: note = Probe
  source 1..38: mol_type = other DNA

SEQ ID NO: 54931 - DNA, 39 bp, synthetic construct; identical to SEQ ID NO: 34062
  misc_feature 1..39: note = Probe
  source 1..39: mol_type = other DNA

SEQ ID NO: 54932 - DNA, 49 bp, synthetic construct; identical to SEQ ID NO: 23495
  misc_feature 1..49: note = Probe
  source 1..49: mol_type = other DNA

SEQ ID NO: 54933 - DNA, 26 bp, synthetic construct
  misc_feature 1..26: note = Probe
  source 1..26: mol_type = other DNA
taggctaaatcctatatatcttaatg

SEQ ID NO: 54934 - DNA, 18 bp, synthetic construct
  misc_feature 1..18: note = Probe
  source 1..18: mol_type = other DNA
taggggtatgattctcgc

SEQ ID NO: 54935 - DNA, 19 bp, synthetic construct
  misc_feature 1..19: note = Probe
  source 1..19: mol_type = other DNA
taggggtatgattctcgct

SEQ ID NO: 54936 - DNA, 37 bp, synthetic construct
  misc_feature 1..37: note = Probe
  source 1..37: mol_type = other DNA
taggggtatgattctcgcttagggtgcgagaggtccc

SEQ ID NO: 54937 - DNA, 37 bp, synthetic construct
  misc_feature 1..37: note = Probe
  source 1..37: mol_type = other DNA
taggggtatgattctcgcttcgggtgcgagaggtccc

SEQ ID NO: 54938 - DNA, 37 bp, synthetic construct; identical to SEQ ID NO: 23503
  misc_feature 1..37: note = Probe
  source 1..37: mol_type = other DNA

SEQ ID NO: 54939 - DNA, 18 bp, synthetic construct
  misc_feature 1..18: note = Probe
  source 1..18: mol_type = other DNA
tagggtgcgagaggtccc

SEQ ID NO: 54940 - DNA, 22 bp, synthetic construct
  misc_feature 1..22: note = Probe
  source 1..22: mol_type = other DNA
tagggtgcgagaggtcccgggt

SEQ ID NO: 54941 - DNA, 23 bp, synthetic construct
  misc_feature 1..23: note = Probe
  source 1..23: mol_type = other DNA
tagggtgcgagaggtcccgggtt

SEQ ID NO: 54942 - DNA, 22 bp, synthetic construct
  misc_feature 1..22: note = Probe
  source 1..22: mol_type = other DNA
tagtaaacaggagatcctgggt

SEQ ID NO: 54943 - DNA, 23 bp, synthetic construct
  misc_feature 1..23: note = Probe
  source 1..23: mol_type = other DNA
tagtaaacaggagatcctgggtt

SEQ ID NO: 54944 - DNA, 20 bp, synthetic construct
  misc_feature 1..20: note = Probe
  source 1..20: mol_type = other DNA
tagtccgtgcgagaataatg

SEQ ID NO: 54945 - DNA, 37 bp, synthetic construct; identical to SEQ ID NO: 14202
  misc_feature 1..37: note = Probe
  source 1..37: mol_type = other DNA

SEQ ID NO: 54946 - DNA, 16 bp, synthetic construct
  misc_feature 1..16: note = Probe
  source 1..16: mol_type = other DNA
tagtggtatcatgcaa

SEQ ID NO: 54947 - DNA, 18 bp, synthetic construct
  misc_feature 1..18: note = Probe
  source 1..18: mol_type = other DNA
tagtggtatcatgcaaga

SEQ ID NO: 54948 - DNA, 27 bp, synthetic construct
  misc_feature 1..27: note = Probe
  source 1..27: mol_type = other DNA
tagtggtatcatgcaagattcccattc

SEQ ID NO: 54949 - DNA, 36 bp, synthetic construct
  misc_feature 1..36: note = Probe
  source 1..36: mol_type = other DNA
tagtggtatcatgcaagattcccattcttgcgaccc

SEQ ID NO: 54950 - DNA, 37 bp, synthetic construct
  misc_feature 1..37: note = Probe
  source 1..37: mol_type = other DNA
tagtggtatcatgcaagattcccattcttgcgacccg

SEQ ID NO: 54951 - DNA, 38 bp, synthetic construct
  misc_feature 1..38: note = Probe
  source 1..38: mol_type = other DNA
tagtggtatcatgcaagattcccattcttgcgacccgg

SEQ ID NO: 54952 - DNA, 18 bp, synthetic construct
  misc_feature 1..18: note = Probe
  source 1..18: mol_type = other DNA
tagtggtatgattctcgc

SEQ ID NO: 54953 - DNA, 19 bp, synthetic construct
  misc_feature 1..19: note = Probe
  source 1..19: mol_type = other DNA
tagtggtatgattctcgct

SEQ ID NO: 54954 - DNA, 37 bp, synthetic construct; identical to SEQ ID NO: 14204
  misc_feature 1..37: note = Probe
  source 1..37: mol_type = other DNA

SEQ ID NO: 54955 - DNA, 38 bp, synthetic construct
  misc_feature 1..38: note = Probe
  source 1..38: mol_type = other DNA
tagtggtatgattctcgctttgggtgcgagaggtcccg

SEQ ID NO: 54956 - DNA, 16 bp, synthetic construct
  misc_feature 1..16: note = Probe
  source 1..16: mol_type = other DNA
tagtggtgagtatccc

SEQ ID NO: 54957 - DNA, 17 bp, synthetic construct
  misc_feature 1..17: note = Probe
  source 1..17: mol_type = other DNA
tagtggtgagtatcccc

SEQ ID NO: 54958 - DNA, 18 bp, synthetic construct
  misc_feature 1..18: note = Probe
  source 1..18: mol_type = other DNA
tagtggtgagtatccccg

SEQ ID NO: 54959 - DNA, 19 bp, synthetic construct
  misc_feature 1..19: note = Probe
  source 1..19: mol_type = other DNA
tagtggtgagtatccccgc

SEQ ID NO: 54960 - DNA, 20 bp, synthetic construct
  misc_feature 1..20: note = Probe
  source 1..20: mol_type = other DNA
tagtggtgagtatccccgcc

SEQ ID NO: 54961 - DNA, 23 bp, synthetic construct
  misc_feature 1..23: note = Probe
  source 1..23: mol_type = other DNA
tagtggtgagtatccccgcctgt

SEQ ID NO: 54962 - DNA, 25 bp, synthetic construct
  misc_feature 1..25: note = Probe
  source 1..25: mol_type = other DNA
tagtggtgagtatccccgcctgtca

SEQ ID NO: 54963 - DNA, 26 bp, synthetic construct
  misc_feature 1..26: note = Probe
  source 1..26: mol_type = other DNA
tagtggtgagtatccccgcctgtcac

SEQ ID NO: 54964 - DNA, 27 bp, synthetic construct
  misc_feature 1..27: note = Probe
  source 1..27: mol_type = other DNA
tagtggtgagtatccccgcctgtcacg

SEQ ID NO: 54965 - DNA, 28 bp, synthetic construct
  misc_feature 1..28: note = Probe
  source 1..28: mol_type = other DNA
tagtggtgagtatccccgcctgtcacgc

SEQ ID NO: 54966 - DNA, 36 bp, synthetic construct; identical to SEQ ID NO: 14212
  misc_feature 1..36: note = Probe
  source 1..36: mol_type = other DNA

SEQ ID NO: 54967 - DNA, 37 bp, synthetic construct; identical to SEQ ID NO: 23534
  misc_feature 1..37: note = Probe
  source 1..37: mol_type = other DNA

SEQ ID NO: 54968 - DNA, 38 bp, synthetic construct; identical to SEQ ID NO: 14213
  misc_feature 1..38: note = Probe
  source 1..38: mol_type = other DNA

SEQ ID NO: 54969 - DNA, 37 bp, synthetic construct; identical to SEQ ID NO: 23538
  misc_feature 1..37: note = Probe
  source 1..37: mol_type = other DNA

SEQ ID NO: 54970 - DNA, 16 bp, synthetic construct
  misc_feature 1..16: note = Probe
  source 1..16: mol_type = other DNA
tagtggttaggattcg

SEQ ID NO: 54971 - DNA, 17 bp, synthetic construct
  misc_feature 1..17: note = Probe
  source 1..17: mol_type = other DNA
tagtggttaggattcgg

SEQ ID NO: 54972 - DNA, 18 bp, synthetic construct
  misc_feature 1..18: note = Probe
  source 1..18: mol_type = other DNA
tagtggttaggattcggc

SEQ ID NO: 54973 - DNA, 22 bp, synthetic construct
  misc_feature 1..22: note = Probe
  source 1..22: mol_type = other DNA
tagtggttaggattcggcgctc

SEQ ID NO: 54974 - DNA, 23 bp, synthetic construct
  misc_feature 1..23: note = Probe
  source 1..23: mol_type = other DNA
tagtggttaggattcggcgctct

SEQ ID NO: 54975 - DNA, 24 bp, synthetic construct
  misc_feature 1..24: note = Probe
  source 1..24: mol_type = other DNA
tagtggttaggattcggcgctctc

SEQ ID NO: 54976 - DNA, 27 bp, synthetic construct
  misc_feature 1..27: note = Probe
  source 1..27: mol_type = other DNA
tagtggttaggattcggcgctctcacc

SEQ ID NO: 54977 - DNA, 29 bp, synthetic construct
  misc_feature 1..29: note = Probe
  source 1..29: mol_type = other DNA
tagtggttaggattcggcgctctcaccgc

SEQ ID NO: 54978 - DNA, 33 bp, synthetic construct; identical to SEQ ID NO: 23549
  misc_feature 1..33: note = Probe
  source 1..33: mol_type = other DNA

SEQ ID NO: 54979 - DNA, 41 bp, synthetic construct
  misc_feature 1..41: note = Probe
  source 1..41: mol_type = other DNA
tagtggttaggattcggcgctctcaccgccgcggcccgggt

SEQ ID NO: 54980 - DNA, 17 bp, synthetic construct
  misc_feature 1..17: note = Probe
  source 1..17: mol_type = other DNA
tagtggttagtactctg

SEQ ID NO: 54981 - DNA, 18 bp, synthetic construct
  misc_feature 1..18: note = Probe
  source 1..18: mol_type = other DNA
tagtggttagtactctgc

SEQ ID NO: 54982 - DNA, 20 bp, synthetic construct
  misc_feature 1..20: note = Probe
  source 1..20: mol_type = other DNA
tagtggttagtactctgcgt

SEQ ID NO: 54983 - DNA, 21 bp, synthetic construct
  misc_feature 1..21: note = Probe
  source 1..21: mol_type = other DNA
tagtggttagtactctgcgtt

SEQ ID NO: 54984 - DNA, 33 bp, synthetic construct; identical to SEQ ID NO: 23556
  misc_feature 1..33: note = Probe
  source 1..33: mol_type = other DNA

SEQ ID NO: 54985 - DNA, 16 bp, synthetic construct
  misc_feature 1..16: note = Probe
  source 1..16: mol_type = other DNA
tagtggttagtatccc

SEQ ID NO: 54986 - DNA, 24 bp, synthetic construct
  misc_feature 1..24: note = Probe
  source 1..24: mol_type = other DNA
tagtggttagtatccccgcctgtc

SEQ ID NO: 54987 - DNA, 26 bp, synthetic construct
  misc_feature 1..26: note = Probe
  source 1..26: mol_type = other DNA
tagtggttagtatccccgcctgtcac

SEQ ID NO: 54988 - DNA, 38 bp, synthetic construct; identical to SEQ ID NO: 23562
  misc_feature 1..38: note = Probe
  source 1..38: mol_type = other DNA

SEQ ID NO: 54989 - DNA, 16 bp, synthetic construct
  misc_feature 1..16: note = Probe
  source 1..16: mol_type = other DNA
tagtggttatcacgtt

SEQ ID NO: 54990 - DNA, 42 bp, synthetic construct; identical to SEQ ID NO: 23563
  misc_feature 1..42: note = Probe
  source 1..42: mol_type = other DNA

SEQ ID NO: 54991 - DNA, 42 bp, synthetic construct; identical to SEQ ID NO: 23565
  misc_feature 1..42: note = Probe
  source 1..42: mol_type = other DNA

SEQ ID NO: 54992 - DNA, 24 bp, synthetic construct
  misc_feature 1..24: note = Probe
  source 1..24: mol_type = other DNA
tagtgtagtggttatcacgttcgc

SEQ ID NO: 54993 - DNA, 25 bp, synthetic construct
  misc_feature 1..25: note = Probe
  source 1..25: mol_type = other DNA
tagtgtagtggttatcacgttcgcc

SEQ ID NO: 54994 - DNA, 15 bp, synthetic construct
  misc_feature 1..15: note = Probe
  source 1..15: mol_type = other DNA
tatacccacacccac

SEQ ID NO: 54995 - DNA, 18 bp, synthetic construct
  misc_feature 1..18: note = Probe
  source 1..18: mol_type = other DNA
tatacccacacccaccca

SEQ ID NO: 54996 - DNA, 19 bp, synthetic construct
  misc_feature 1..19: note = Probe
  source 1..19: mol_type = other DNA
tatacccacacccacccaa

SEQ ID NO: 54997 - DNA, 20 bp, synthetic construct
  misc_feature 1..20: note = Probe
  source 1..20: mol_type = other DNA
tatacccacacccacccaag

SEQ ID NO: 54998 - DNA, 21 bp, synthetic construct
  misc_feature 1..21: note = Probe
  source 1..21: mol_type = other DNA
tatacccacacccacccaaga

SEQ ID NO: 54999 - DNA, 24 bp, synthetic construct
  misc_feature 1..24: note = Probe
  source 1..24: mol_type = other DNA
tatacccacacccacccaagaaca

SEQ ID NO: 55000 - DNA, 26 bp, synthetic construct
  misc_feature 1..26: note = Probe
  source 1..26: mol_type = other DNA
tatacccacacccacccaagaacagg

SEQ ID NO: 55001 - DNA, 27 bp, synthetic construct
  misc_feature 1..27: note = Probe
  source 1..27: mol_type = other DNA
tatacccacacccacccaagaacaggg

SEQ ID NO: 55002 - DNA, 28 bp, synthetic construct
  misc_feature 1..28: note = Probe
  source 1..28: mol_type = other DNA
tatacccacacccacccaagaacagggt

SEQ ID NO: 55003 - DNA, 29 bp, synthetic construct
  misc_feature 1..29: note = Probe
  source 1..29: mol_type = other DNA
tatacccacacccacccaagaacagggtt

SEQ ID NO: 55004 - DNA, 30 bp, synthetic construct; identical to SEQ ID NO: 7623
  misc_feature 1..30: note = Probe
  source 1..30: mol_type = other DNA

SEQ ID NO: 55005 - DNA, 31 bp, synthetic construct; identical to SEQ ID NO: 7624
  misc_feature 1..31: note = Probe
  source 1..31: mol_type = other DNA

SEQ ID NO: 55006 - DNA, 32 bp, synthetic construct; identical to SEQ ID NO: 7625
  misc_feature 1..32: note = Probe
  source 1..32: mol_type = other DNA

SEQ ID NO: 55007 - DNA, 33 bp, synthetic construct; identical to SEQ ID NO: 7626
  misc_feature 1..33: note = Probe
  source 1..33: mol_type = other DNA

SEQ ID NO: 55008 - DNA, 34 bp, synthetic construct; identical to SEQ ID NO: 7627
  misc_feature 1..34: note = Probe
  source 1..34: mol_type = other DNA

SEQ ID NO: 55009 - DNA, 35 bp, synthetic construct; identical to SEQ ID NO: 7628
  misc_feature 1..35: note = Probe
  source 1..35: mol_type = other DNA

SEQ ID NO: 55010 - DNA, 36 bp, synthetic construct; identical to SEQ ID NO: 7629
  misc_feature 1..36: note = Probe
  source 1..36: mol_type = other DNA

SEQ ID NO: 55011 - DNA, 37 bp, synthetic construct; identical to SEQ ID NO: 7630
  misc_feature 1..37: note = Probe
  source 1..37: mol_type = other DNA

SEQ ID NO: 55012 - DNA, 38 bp, synthetic construct; identical to SEQ ID NO: 23596
  misc_feature 1..38: note = Probe
  source 1..38: mol_type = other DNA

SEQ ID NO: 55013 - DNA, 39 bp, synthetic construct; identical to SEQ ID NO: 7631
  misc_feature 1..39: note = Probe
  source 1..39: mol_type = other DNA

SEQ ID NO: 55014 - DNA, 40 bp, synthetic construct; identical to SEQ ID NO: 7632
  misc_feature 1..40: note = Probe
  source 1..40: mol_type = other DNA

SEQ ID NO: 55015 - DNA, 38 bp, synthetic construct; identical to SEQ ID NO: 7637
  misc_feature 1..38: note = Probe
  source 1..38: mol_type = other DNA

SEQ ID NO: 55016 - DNA, 50 bp, synthetic construct
  misc_feature 1..50: note = Probe
  source 1..50: mol_type = other DNA
tatccattggtcttaggccccaaaaattttggtgcaactccaaataaaag

SEQ ID NO: 55017 - DNA, 49 bp, synthetic construct
  misc_feature 1..49: note = Probe
  source 1..49: mol_type = other DNA
tatccccgcctgtcacgcgggagaccggggttcgattccccgacgggga

SEQ ID NO: 55018 - DNA, 24 bp, synthetic construct
  misc_feature 1..24: note = Probe
  source 1..24: mol_type = other DNA
tatgataatcatatttaccaaatg

SEQ ID NO: 55019 - DNA, 16 bp, synthetic construct
  misc_feature 1..16: note = Probe
  source 1..16: mol_type = other DNA
tcaaaggttccgggtt

SEQ ID NO: 55020 - DNA, 32 bp, synthetic construct; identical to SEQ ID NO: 7643
  misc_feature 1..32: note = Probe
  source 1..32: mol_type = other DNA

SEQ ID NO: 55021 - DNA, 22 bp, synthetic construct
  misc_feature 1..22: note = Probe
  source 1..22: mol_type = other DNA
tcaaatcccggacgagccccct

SEQ ID NO: 55022 - DNA, 23 bp, synthetic construct
  misc_feature 1..23: note = Probe
  source 1..23: mol_type = other DNA
tcaaatcccggacgagccccctt

SEQ ID NO: 55023 - DNA, 24 bp, synthetic construct
  misc_feature 1..24: note = Probe
  source 1..24: mol_type = other DNA
tcaaatcccggacgagcccccttt

SEQ ID NO: 55024 - DNA, 25 bp, synthetic construct
  misc_feature 1..25: note = Probe
  source 1..25: mol_type = other DNA
tcaaatcccggacgagccccctttt

SEQ ID NO: 55025 - DNA, 22 bp, synthetic construct
  misc_feature 1..22: note = Probe
  source 1..22: mol_type = other DNA
tcaaatcccggacgagcccggt

SEQ ID NO: 55026 - DNA, 23 bp, synthetic construct
  misc_feature 1..23: note = Probe
  source 1..23: mol_type = other DNA
tcaaatcccggacgagcccggtt

SEQ ID NO: 55027 - DNA, 23 bp, synthetic construct
  misc_feature 1..23: note = Probe
  source 1..23: mol_type = other DNA
tcaaatcccggacgagccctcat

SEQ ID NO: 55028 - DNA, 24 bp, synthetic construct
  misc_feature 1..24: note = Probe
  source 1..24: mol_type = other DNA
tcaaatcccggacgagccctcatt

SEQ ID NO: 55029 - DNA, 25 bp, synthetic construct
  misc_feature 1..25: note = Probe
  source 1..25: mol_type = other DNA
tcaaatcccggacgagccctcattt

SEQ ID NO: 55030 - DNA, 22 bp, synthetic construct
  misc_feature 1..22: note = Probe
  source 1..22: mol_type = other DNA
tcaaatccgggtgccccctcaa

SEQ ID NO: 55031 - DNA, 23 bp, synthetic construct
  misc_feature 1..23: note = Probe
  source 1..23: mol_type = other DNA
tcaaatccgggtgccccctcaat

SEQ ID NO: 55032 - DNA, 22 bp, synthetic construct
  misc_feature 1..22: note = Probe
  source 1..22: mol_type = other DNA
tcaaatccgggtgccccctcac

SEQ ID NO: 55033 - DNA, 22 bp, synthetic construct
  misc_feature 1..22: note = Probe
  source 1..22: mol_type = other DNA
tcaaatccgggtgccccctctg

SEQ ID NO: 55034 - DNA, 24 bp, synthetic construct
  misc_feature 1..24: note = Probe
  source 1..24: mol_type = other DNA
tcaacttaacttgaccgctctgag

SEQ ID NO: 55035 - DNA, 25 bp, synthetic construct
  misc_feature 1..25: note = Probe
  source 1..25: mol_type = other DNA
tcaacttaacttgaccgctctgagc

SEQ ID NO: 55036 - DNA, 26 bp, synthetic construct
  misc_feature 1..26: note = Probe
  source 1..26: mol_type = other DNA
tcaacttaacttgaccgctctgagct

SEQ ID NO: 55037 - DNA, 16 bp, synthetic construct
  misc_feature 1..16: note = Probe
  source 1..16: mol_type = other DNA
tcaagaggtccccggt

SEQ ID NO: 55038 - DNA, 38 bp, synthetic construct; identical to SEQ ID NO: 23641
  misc_feature 1..38: note = Probe
  source 1..38: mol_type = other DNA

SEQ ID NO: 55039 - DNA, 22 bp, synthetic construct
  misc_feature 1..22: note = Probe
  source 1..22: mol_type = other DNA
tcaagtccctgttcgggcggca

SEQ ID NO: 55040 - DNA, 22 bp, synthetic construct
  misc_feature 1..22: note = Probe
  source 1..22: mol_type = other DNA
tcaatcccgggtttcggcagcg

SEQ ID NO: 55041 - DNA, 22 bp, synthetic construct
  misc_feature 1..22: note = Probe
  source 1..22: mol_type = other DNA
tcacaagaactgctaactcatg

SEQ ID NO: 55042 - DNA, 45 bp, synthetic construct; identical to SEQ ID NO: 1607
  misc_feature 1..45: note = Probe
  source 1..45: mol_type = other DNA

SEQ ID NO: 55043 - DNA, 46 bp, synthetic construct; identical to SEQ ID NO: 1608
  misc_feature 1..46: note = Probe
  source 1..46: mol_type = other DNA

SEQ ID NO: 55044 - DNA, 17 bp, synthetic construct
  misc_feature 1..17: note = Probe
  source 1..17: mol_type = other DNA
tcacacgcgaaaggtcc

SEQ ID NO: 55045 - DNA, 19 bp, synthetic construct
  misc_feature 1..19: note = Probe
  source 1..19: mol_type = other DNA
tcacacgcgaaaggtcccc

SEQ ID NO: 55046 - DNA, 21 bp, synthetic construct
  misc_feature 1..21: note = Probe
  source 1..21: mol_type = other DNA
tcacacgcgaaaggtccccgg

SEQ ID NO: 55047 - DNA, 23 bp, synthetic construct
  misc_feature 1..23: note = Probe
  source 1..23: mol_type = other DNA
tcacacgcgaaaggtccccggtt

SEQ ID NO: 55048 - DNA, 24 bp, synthetic construct
  misc_feature 1..24: note = Probe
  source 1..24: mol_type = other DNA
tcacacgcgaaaggtccccggttc

SEQ ID NO: 55049 - DNA, 25 bp, synthetic construct
  misc_feature 1..25: note = Probe
  source 1..25: mol_type = other DNA
tcacacgcgaaaggtccccggttcg

SEQ ID NO: 55050 - DNA, 37 bp, synthetic construct
  misc_feature 1..37: note = Probe
  source 1..37: mol_type = other DNA
tcacacgcgaaaggtccccggttcgaaaccgggcgga

SEQ ID NO: 55051 - DNA, 38 bp, synthetic construct; identical to SEQ ID NO: 41688
  misc_feature 1..38: note = Probe
  source 1..38: mol_type = other DNA

SEQ ID NO: 55052 - DNA, 24 bp, synthetic construct
  misc_feature 1..24: note = Probe
  source 1..24: mol_type = other DNA
tcacacgcgaaaggtccccggttt

SEQ ID NO: 55053 - DNA, 25 bp, synthetic construct
  misc_feature 1..25: note = Probe
  source 1..25: mol_type = other DNA
tcacacgcgaaaggtccccggtttg

SEQ ID NO: 55054 - DNA, 22 bp, synthetic construct
  misc_feature 1..22: note = Probe
  source 1..22: mol_type = other DNA
tcacatcaccccataaacaaat

SEQ ID NO: 55055 - DNA, 41 bp, synthetic construct; identical to SEQ ID NO: 7677
  misc_feature 1..41: note = Probe
  source 1..41: mol_type = other DNA

SEQ ID NO: 55056 - DNA, 20 bp, synthetic construct
  misc_feature 1..20: note = Probe
  source 1..20: mol_type = other DNA
tcaccgccgcggcccgggtt

SEQ ID NO: 55057 - DNA, 21 bp, synthetic construct
  misc_feature 1..21: note = Probe
  source 1..21: mol_type = other DNA
tcaccgccgcggcccgggttc

SEQ ID NO: 55058 - DNA, 20 bp, synthetic construct
  misc_feature 1..20: note = Probe
  source 1..20: mol_type = other DNA
tcacctggagcatgttttct

SEQ ID NO: 55059 - DNA, 21 bp, synthetic construct
  misc_feature 1..21: note = Probe
  source 1..21: mol_type = other DNA
tcacctggagcatgttttctt

SEQ ID NO: 55060 - DNA, 22 bp, synthetic construct
  misc_feature 1..22: note = Probe
  source 1..22: mol_type = other DNA
tcacctggagcatgttttcttc

SEQ ID NO: 55061 - DNA, 23 bp, synthetic construct
  misc_feature 1..23: note = Probe
  source 1..23: mol_type = other DNA
tcacctggagcatgttttcttcc

SEQ ID NO: 55062 - DNA, 19 bp, synthetic construct
  misc_feature 1..19: note = Probe
  source 1..19: mol_type = other DNA
tcacgcgggagaccggggt

SEQ ID NO: 55063 - DNA, 20 bp, synthetic construct
  misc_feature 1..20: note = Probe
  source 1..20: mol_type = other DNA
tcacgcgggagaccggggtt

SEQ ID NO: 55064 - DNA, 21 bp, synthetic construct
  misc_feature 1..21: note = Probe
  source 1..21: mol_type = other DNA
tcacgcgggagaccggggttc

SEQ ID NO: 55065 - DNA, 23 bp, synthetic construct
  misc_feature 1..23: note = Probe
  source 1..23: mol_type = other DNA
tcacgcgggagaccggggttcaa

SEQ ID NO: 55066 - DNA, 41 bp, synthetic construct; identical to SEQ ID NO: 7691
  misc_feature 1..41: note = Probe
  source 1..41: mol_type = other DNA

SEQ ID NO: 55067 - DNA, 32 bp, synthetic construct; identical to SEQ ID NO: 1618
  misc_feature 1..32: note = Probe
  source 1..32: mol_type = other DNA

SEQ ID NO: 55068 - DNA, 33 bp, synthetic construct; identical to SEQ ID NO: 1619
  misc_feature 1..33: note = Probe
  source 1..33: mol_type = other DNA

SEQ ID NO: 55069 - DNA, 34 bp, synthetic construct; identical to SEQ ID NO: 1620
  misc_feature 1..34: note = Probe
  source 1..34: mol_type = other DNA

SEQ ID NO: 55070 - DNA, 38 bp, synthetic construct; identical to SEQ ID NO: 1623
  misc_feature 1..38: note = Probe
  source 1..38: mol_type = other DNA

SEQ ID NO: 55071 - DNA, 39 bp, synthetic construct; identical to SEQ ID NO: 7699
  misc_feature 1..39: note = Probe
  source 1..39: mol_type = other DNA

SEQ ID NO: 55072 - DNA, 39 bp, synthetic construct; identical to SEQ ID NO: 7711
  misc_feature 1..39: note = Probe
  source 1..39: mol_type = other DNA

SEQ ID NO: 55073 - DNA, 41 bp, synthetic construct; identical to SEQ ID NO: 7716
  misc_feature 1..41: note = Probe
  source 1..41: mol_type = other DNA

SEQ ID NO: 55074 - DNA, 49 bp, synthetic construct; identical to SEQ ID NO: 7719
  misc_feature 1..49: note = Probe
  source 1..49: mol_type = other DNA

SEQ ID NO: 55075 - DNA, 50 bp, synthetic construct; identical to SEQ ID NO: 7720
  misc_feature 1..50: note = Probe
  source 1..50: mol_type = other DNA

SEQ ID NO: 55076 - DNA, 41 bp, synthetic construct; identical to SEQ ID NO: 7723
  misc_feature 1..41: note = Probe
  source 1..41: mol_type = other DNA

SEQ ID NO: 55077 - DNA, 42 bp, synthetic construct; identical to SEQ ID NO: 7724
  misc_feature 1..42: note = Probe
  source 1..42: mol_type = other DNA

SEQ ID NO: 55078 - DNA, 43 bp, synthetic construct; identical to SEQ ID NO: 7725
  misc_feature 1..43: note = Probe
  source 1..43: mol_type = other DNA

SEQ ID NO: 55079 - DNA, 19 bp, synthetic construct
  misc_feature 1..19: note = Probe
  source 1..19: mol_type = other DNA
tcacgtctgctttacacgc

SEQ ID NO: 55080 - DNA, 38 bp, synthetic construct; identical to SEQ ID NO: 7729
  misc_feature 1..38: note = Probe
  source 1..38: mol_type = other DNA

SEQ ID NO: 55081 - DNA, 50 bp, synthetic construct; identical to SEQ ID NO: 7731
  misc_feature 1..50: note = Probe
  source 1..50: mol_type = other DNA

SEQ ID NO: 55082 - DNA, 28 bp, synthetic construct
  misc_feature 1..28: note = Probe
  source 1..28: mol_type = other DNA
tcagcctccggagctggggattgtgggt

SEQ ID NO: 55083 - DNA, 27 bp, synthetic construct
  misc_feature 1..27: note = Probe
  source 1..27: mol_type = other DNA
tcagctaaataagctatcgggcccata

SEQ ID NO: 55084 - DNA, 28 bp, synthetic construct
  misc_feature 1..28: note = Probe
  source 1..28: mol_type = other DNA
tcagctaaataagctatcgggcccatac

SEQ ID NO: 55085 - DNA, 37 bp, synthetic construct; identical to SEQ ID NO: 7737
  misc_feature 1..37: note = Probe
  source 1..37: mol_type = other DNA

SEQ ID NO: 55086 - DNA, 38 bp, synthetic construct; identical to SEQ ID NO: 23716
  misc_feature 1..38: note = Probe
  source 1..38: mol_type = other DNA

SEQ ID NO: 55087 - DNA, 39 bp, synthetic construct; identical to SEQ ID NO: 7738
  misc_feature 1..39: note = Probe
  source 1..39: mol_type = other DNA

SEQ ID NO: 55088 - DNA, 18 bp, synthetic construct
  misc_feature 1..18: note = Probe
  source 1..18: mol_type = other DNA
tcagtcggtagagcatca

SEQ ID NO: 55089 - DNA, 37 bp, synthetic construct; identical to SEQ ID NO: 7747
  misc_feature 1..37: note = Probe
  source 1..37: mol_type = other DNA

SEQ ID NO: 55090 - DNA, 22 bp, synthetic construct
  misc_feature 1..22: note = Probe
  source 1..22: mol_type = other DNA
tcataatctgaaggtcgtgagt

SEQ ID NO: 55091 - DNA, 38 bp, synthetic construct; identical to SEQ ID NO: 14239
  misc_feature 1..38: note = Probe
  source 1..38: mol_type = other DNA

SEQ ID NO: 55092 - DNA, 41 bp, synthetic construct; identical to SEQ ID NO: 7751
  misc_feature 1..41: note = Probe
  source 1..41: mol_type = other DNA

SEQ ID NO: 55093 - DNA, 15 bp, synthetic construct
  misc_feature 1..15: note = Probe
  source 1..15: mol_type = other DNA
tcatattgaattgca

SEQ ID NO: 55094 - DNA, 50 bp, synthetic construct; identical to SEQ ID NO: 7753
  misc_feature 1..50: note = Probe
  source 1..50: mol_type = other DNA

SEQ ID NO: 55095 - DNA, 19 bp, synthetic construct
  misc_feature 1..19: note = Probe
  source 1..19: mol_type = other DNA
tcatgcaagattcccattc

SEQ ID NO: 55096 - DNA, 33 bp, synthetic construct; identical to SEQ ID NO: 23734
  misc_feature 1..33: note = Probe
  source 1..33: mol_type = other DNA

SEQ ID NO: 55097 - DNA, 17 bp, synthetic construct
  misc_feature 1..17: note = Probe
  source 1..17: mol_type = other DNA
tcatgcccccatgtcta

SEQ ID NO: 55098 - DNA, 20 bp, synthetic construct
  misc_feature 1..20: note = Probe
  source 1..20: mol_type = other DNA
tcatgcccccatgtctaaca

SEQ ID NO: 55099 - DNA, 21 bp, synthetic construct
  misc_feature 1..21: note = Probe
  source 1..21: mol_type = other DNA
tcatgcccccatgtctaacaa

SEQ ID NO: 55100 - DNA, 24 bp, synthetic construct
  misc_feature 1..24: note = Probe
  source 1..24: mol_type = other DNA
tcatgcccccatgtctaacaacat

SEQ ID NO: 55101 - DNA, 25 bp, synthetic construct
  misc_feature 1..25: note = Probe
  source 1..25: mol_type = other DNA
tcatgcccccatgtctaacaacatg

SEQ ID NO: 55102 - DNA, 26 bp, synthetic construct
  misc_feature 1..26: note = Probe
  source 1..26: mol_type = other DNA
tcatgcccccatgtctaacaacatgg

SEQ ID NO: 55103 - DNA, 28 bp, synthetic construct
  misc_feature 1..28: note = Probe
  source 1..28: mol_type = other DNA
tcatgcccccatgtctaacaacatggct

SEQ ID NO: 55104 - DNA, 29 bp, synthetic construct
  misc_feature 1..29: note = Probe
  source 1..29: mol_type = other DNA
tcatgcccccatgtctaacaacatggctt

SEQ ID NO: 55105 - DNA, 30 bp, synthetic construct; identical to SEQ ID NO: 7761
  misc_feature 1..30: note = Probe
  source 1..30: mol_type = other DNA

SEQ ID NO: 55106 - DNA, 31 bp, synthetic construct; identical to SEQ ID NO: 7762
  misc_feature 1..31: note = Probe
  source 1..31: mol_type = other DNA

SEQ ID NO: 55107 - DNA, 32 bp, synthetic construct; identical to SEQ ID NO: 7763
  misc_feature 1..32: note = Probe
  source 1..32: mol_type = other DNA

SEQ ID NO: 55108 - DNA, 33 bp, synthetic construct; identical to SEQ ID NO: 7764
  misc_feature 1..33: note = Probe
  source 1..33: mol_type = other DNA

SEQ ID NO: 55109 - DNA, 34 bp, synthetic construct; identical to SEQ ID NO: 7765
  misc_feature 1..34: note = Probe
  source 1..34: mol_type = other DNA

SEQ ID NO: 55110 - DNA, 35 bp, synthetic construct; identical to SEQ ID NO: 7766
  misc_feature 1..35: note = Probe
  source 1..35: mol_type = other DNA

SEQ ID NO: 55111 - DNA, 36 bp, synthetic construct; identical to SEQ ID NO: 7767
  misc_feature 1..36: note = Probe
  source 1..36: mol_type = other DNA

SEQ ID NO: 55112 - DNA, 37 bp, synthetic construct; identical to SEQ ID NO: 7768
  misc_feature 1..37: note = Probe
  source 1..37: mol_type = other DNA

SEQ ID NO: 55113 - DNA, 38 bp, synthetic construct; identical to SEQ ID NO: 23749
  misc_feature 1..38: note = Probe
  source 1..38: mol_type = other DNA

SEQ ID NO: 55114 - DNA, 39 bp, synthetic construct; identical to SEQ ID NO: 23750
  misc_feature 1..39: note = Probe
  source 1..39: mol_type = other DNA

SEQ ID NO: 55115 - DNA, 40 bp, synthetic construct
  misc_feature 1..40: note = Probe
  source 1..40: mol_type = other DNA
tcatgcccccatgtctaacaacatggctttctcaactttt

SEQ ID NO: 55116 - DNA, 33 bp, synthetic construct; identical to SEQ ID NO: 7769
  misc_feature 1..33: note = Probe
  source 1..33: mol_type = other DNA

SEQ ID NO: 55117 - DNA, 36 bp, synthetic construct; identical to SEQ ID NO: 34374
  misc_feature 1..36: note = Probe
  source 1..36: mol_type = other DNA

SEQ ID NO: 55118 - DNA, 39 bp, synthetic construct; identical to SEQ ID NO: 7775
  misc_feature 1..39: note = Probe
  source 1..39: mol_type = other DNA

SEQ ID NO: 55119 - DNA, 41 bp, synthetic construct; identical to SEQ ID NO: 7777
  misc_feature 1..41: note = Probe
  source 1..41: mol_type = other DNA

SEQ ID NO: 55120 - DNA, 17 bp, synthetic construct
  misc_feature 1..17: note = Probe
  source 1..17: mol_type = other DNA
tccagcgatccgagttc

SEQ ID NO: 55121 - DNA, 25 bp, synthetic construct
  misc_feature 1..25: note = Probe
  source 1..25: mol_type = other DNA
tccattggggtttccccgcgcaggt

SEQ ID NO: 55122 - DNA, 44 bp, synthetic construct; identical to SEQ ID NO: 23813
  misc_feature 1..44: note = Probe
  source 1..44: mol_type = other DNA

SEQ ID NO: 55123 - DNA, 48 bp, synthetic construct
  misc_feature 1..48: note = Probe
  source 1..48: mol_type = other DNA
tccattggtcttaggccccaaaaattttggtgcaactccaaataaaag

SEQ ID NO: 55124 - DNA, 20 bp, synthetic construct
  misc_feature 1..20: note = Probe
  source 1..20: mol_type = other DNA
tcccacatggtctagcggtt

SEQ ID NO: 55125 - DNA, 21 bp, synthetic construct
  misc_feature 1..21: note = Probe
  source 1..21: mol_type = other DNA
tcccacatggtctagcggtta

SEQ ID NO: 55126 - DNA, 32 bp, synthetic construct; identical to SEQ ID NO: 1645
  misc_feature 1..32: note = Probe
  source 1..32: mol_type = other DNA

SEQ ID NO: 55127 - DNA, 36 bp, synthetic construct; identical to SEQ ID NO: 1649
  misc_feature 1..36: note = Probe
  source 1..36: mol_type = other DNA

SEQ ID NO: 55128 - DNA, 39 bp, synthetic construct; identical to SEQ ID NO: 7795
  misc_feature 1..39: note = Probe
  source 1..39: mol_type = other DNA

SEQ ID NO: 55129 - DNA, 42 bp, synthetic construct; identical to SEQ ID NO: 23823
  misc_feature 1..42: note = Probe
  source 1..42: mol_type = other DNA

SEQ ID NO: 55130 - DNA, 44 bp, synthetic construct; identical to SEQ ID NO: 23824
  misc_feature 1..44: note = Probe
  source 1..44: mol_type = other DNA

SEQ ID NO: 55131 - DNA, 45 bp, synthetic construct; identical to SEQ ID NO: 41781
  misc_feature 1..45: note = Probe
  source 1..45: mol_type = other DNA

SEQ ID NO: 55132 - DNA, 49 bp, synthetic construct; identical to SEQ ID NO: 7797
  misc_feature 1..49: note = Probe
  source 1..49: mol_type = other DNA

SEQ ID NO: 55133 - DNA, 50 bp, synthetic construct; identical to SEQ ID NO: 7798
  misc_feature 1..50: note = Probe
  source 1..50: mol_type = other DNA

SEQ ID NO: 55134 - DNA, 20 bp, synthetic construct
  misc_feature 1..20: note = Probe
  source 1..20: mol_type = other DNA
tcccaccgctgccacacctc

SEQ ID NO: 55135 - DNA, 20 bp, synthetic construct
  misc_feature 1..20: note = Probe
  source 1..20: mol_type = other DNA
tcccaccgctgccaggttta

SEQ ID NO: 55136 - DNA, 23 bp, synthetic construct
  misc_feature 1..23: note = Probe
  source 1..23: mol_type = other DNA
tcccatatggtctagcggttagg

SEQ ID NO: 55137 - DNA, 24 bp, synthetic construct
  misc_feature 1..24: note = Probe
  source 1..24: mol_type = other DNA
tcccatatggtctagcggttagga

SEQ ID NO: 55138 - DNA, 30 bp, synthetic construct; identical to SEQ ID NO: 1659
  misc_feature 1..30: note = Probe
  source 1..30: mol_type = other DNA

SEQ ID NO: 55139 - DNA, 31 bp, synthetic construct; identical to SEQ ID NO: 1660
  misc_feature 1..31: note = Probe
  source 1..31: mol_type = other DNA

SEQ ID NO: 55140 - DNA, 32 bp, synthetic construct; identical to SEQ ID NO: 1661
  misc_feature 1..32: note = Probe
  source 1..32: mol_type = other DNA

SEQ ID NO: 55141 - DNA, 34 bp, synthetic construct; identical to SEQ ID NO: 1663
  misc_feature 1..34: note = Probe
  source 1..34: mol_type = other DNA

SEQ ID NO: 55142 - DNA, 35 bp, synthetic construct; identical to SEQ ID NO: 1664
  misc_feature 1..35: note = Probe
  source 1..35: mol_type = other DNA

SEQ ID NO: 55143 - DNA, 39 bp, synthetic construct; identical to SEQ ID NO: 7803
  misc_feature 1..39: note = Probe
  source 1..39: mol_type = other DNA

SEQ ID NO: 55144 - DNA, 40 bp, synthetic construct; identical to SEQ ID NO: 7804
  misc_feature 1..40: note = Probe
  source 1..40: mol_type = other DNA

SEQ ID NO: 55145 - DNA, 41 bp, synthetic construct; identical to SEQ ID NO: 14294
  misc_feature 1..41: note = Probe
  source 1..41: mol_type = other DNA

SEQ ID NO: 55146 - DNA, 50 bp, synthetic construct; identical to SEQ ID NO: 7805
  misc_feature 1..50: note = Probe
  source 1..50: mol_type = other DNA

SEQ ID NO: 55147 - DNA, 38 bp, synthetic construct
  misc_feature 1..38: note = Probe
  source 1..38: mol_type = other DNA
tcccattcttgcgacccgggttcgattcccgggcggcg

SEQ ID NO: 55148 - DNA, 39 bp, synthetic construct
  misc_feature 1..39: note = Probe
  source 1..39: mol_type = other DNA
tcccattcttgcgacccgggttcgattcccgggcggcgc

SEQ ID NO: 55149 - DNA, 40 bp, synthetic construct
  misc_feature 1..40: note = Probe
  source 1..40: mol_type = other DNA
tcccattcttgcgacccgggttcgattcccgggcggcgca

SEQ ID NO: 55150 - DNA, 42 bp, synthetic construct
  misc_feature 1..42: note = Probe
  source 1..42: mol_type = other DNA
tcccattcttgcgacccgggttcgattcccgggcggcgcact

SEQ ID NO: 55151 - DNA, 43 bp, synthetic construct; identical to SEQ ID NO: 7806
  misc_feature 1..43: note = Probe
  source 1..43: mol_type = other DNA

SEQ ID NO: 55152 - DNA, 50 bp, synthetic construct
  misc_feature 1..50: note = Probe
  source 1..50: mol_type = other DNA
tcccattcttgcgacccgggttcgattcccgggcggcgcacttagttttt

SEQ ID NO: 55153 - DNA, 20 bp, synthetic construct
  misc_feature 1..20: note = Probe
  source 1..20: mol_type = other DNA
tccccggcacctccaaacgg

SEQ ID NO: 55154 - DNA, 21 bp, synthetic construct
  misc_feature 1..21: note = Probe
  source 1..21: mol_type = other DNA
tccccggcacctccaaacggt

SEQ ID NO: 55155 - DNA, 22 bp, synthetic construct
  misc_feature 1..22: note = Probe
  source 1..22: mol_type = other DNA
tccccggcacctccaaacggtg

SEQ ID NO: 55156 - DNA, 19 bp, synthetic construct
  misc_feature 1..19: note = Probe
  source 1..19: mol_type = other DNA
tccccggcacctccaccag

SEQ ID NO: 55157 - DNA, 20 bp, synthetic construct
  misc_feature 1..20: note = Probe
  source 1..20: mol_type = other DNA
tccccggcacctccaccagt

SEQ ID NO: 55158 - DNA, 21 bp, synthetic construct
  misc_feature 1..21: note = Probe
  source 1..21: mol_type = other DNA
tccccggcacctccaccagtt

SEQ ID NO: 55159 - DNA, 22 bp, synthetic construct
  misc_feature 1..22: note = Probe
  source 1..22: mol_type = other DNA
tccccggcacctccaccagttt

SEQ ID NO: 55160 - DNA, 23 bp, synthetic construct
  misc_feature 1..23: note = Probe
  source 1..23: mol_type = other DNA
tccccggcacctccaccagtttt

SEQ ID NO: 55161 - DNA, 24 bp, synthetic construct
  misc_feature 1..24: note = Probe
  source 1..24: mol_type = other DNA
tccccggcacctccaccagttttg

SEQ ID NO: 55162 - DNA, 25 bp, synthetic construct
  misc_feature 1..25: note = Probe
  source 1..25: mol_type = other DNA
tccccggcacctccaccagttttgg

SEQ ID NO: 55163 - DNA, 18 bp, synthetic construct
  misc_feature 1..18: note = Probe
  source 1..18: mol_type = other DNA
tccccggcacctccattc

SEQ ID NO: 55164 - DNA, 19 bp, synthetic construct
  misc_feature 1..19: note = Probe
  source 1..19: mol_type = other DNA
tccccggcacctccattcc

SEQ ID NO: 55165 - DNA, 20 bp, synthetic construct
  misc_feature 1..20: note = Probe
  source 1..20: mol_type = other DNA
tccccggcacctccattcct

SEQ ID NO: 55166 - DNA, 18 bp, synthetic construct
  misc_feature 1..18: note = Probe
  source 1..18: mol_type = other DNA
tccccggcatctccattg

SEQ ID NO: 55167 - DNA, 19 bp, synthetic construct
  misc_feature 1..19: note = Probe
  source 1..19: mol_type = other DNA
tccccggcatctccattgt

SEQ ID NO: 55168 - DNA, 20 bp, synthetic construct
  misc_feature 1..20: note = Probe
  source 1..20: mol_type = other DNA
tccccggcatctccattgta

SEQ ID NO: 55169 - DNA, 21 bp, synthetic construct
  misc_feature 1..21: note = Probe
  source 1..21: mol_type = other DNA
tccccggcatctccattgtag

SEQ ID NO: 55170 - DNA, 15 bp, synthetic construct
  misc_feature 1..15: note = Probe
  source 1..15: mol_type = other DNA
tcccgccttttttcc

SEQ ID NO: 55171 - DNA, 16 bp, synthetic construct
  misc_feature 1..16: note = Probe
  source 1..16: mol_type = other DNA
tcccgccttttttccc

SEQ ID NO: 55172 - DNA, 17 bp, synthetic construct
  misc_feature 1..17: note = Probe
  source 1..17: mol_type = other DNA
tcccgccttttttcccg

SEQ ID NO: 55173 - DNA, 18 bp, synthetic construct
  misc_feature 1..18: note = Probe
  source 1..18: mol_type = other DNA
tcccgccttttttcccgg

SEQ ID NO: 55174 - DNA, 19 bp, synthetic construct
  misc_feature 1..19: note = Probe
  source 1..19: mol_type = other DNA
tcccgccttttttcccggc

SEQ ID NO: 55175 - DNA, 20 bp, synthetic construct
  misc_feature 1..20: note = Probe
  source 1..20: mol_type = other DNA
tcccgccttttttcccggcg

SEQ ID NO: 55176 - DNA, 21 bp, synthetic construct
  misc_feature 1..21: note = Probe
  source 1..21: mol_type = other DNA
tcccgccttttttcccggcgg

SEQ ID NO: 55177 - DNA, 23 bp, synthetic construct
  misc_feature 1..23: note = Probe
  source 1..23: mol_type = other DNA
tcccgccttttttcccggcggcg

SEQ ID NO: 55178 - DNA, 25 bp, synthetic construct
  misc_feature 1..25: note = Probe
  source 1..25: mol_type = other DNA
tcccgccttttttcccggcggcggg

SEQ ID NO: 55179 - DNA, 26 bp, synthetic construct
  misc_feature 1..26: note = Probe
  source 1..26: mol_type = other DNA
tcccgccttttttcccggcggcggga

SEQ ID NO: 55180 - DNA, 27 bp, synthetic construct
  misc_feature 1..27: note = Probe
  source 1..27: mol_type = other DNA
tcccgccttttttcccggcggcgggag

SEQ ID NO: 55181 - DNA, 28 bp, synthetic construct
  misc_feature 1..28: note = Probe
  source 1..28: mol_type = other DNA
tcccgccttttttcccggcggcgggaga

SEQ ID NO: 55182 - DNA, 30 bp, synthetic construct; identical to SEQ ID NO: 7829
  misc_feature 1..30: note = Probe
  source 1..30: mol_type = other DNA

SEQ ID NO: 55183 - DNA, 31 bp, synthetic construct; identical to SEQ ID NO: 7830
  misc_feature 1..31: note = Probe
  source 1..31: mol_type = other DNA

SEQ ID NO: 55184 - DNA, 32 bp, synthetic construct; identical to SEQ ID NO: 7831
  misc_feature 1..32: note = Probe
  source 1..32: mol_type = other DNA

SEQ ID NO: 55185 - DNA, 17 bp, synthetic construct
  misc_feature 1..17: note = Probe
  source 1..17: mol_type = other DNA
tcccggacgagccccct

SEQ ID NO: 55186 - DNA, 19 bp, synthetic construct
  misc_feature 1..19: note = Probe
  source 1..19: mol_type = other DNA
tcccggacgagcccccttt

SEQ ID NO: 55187 - DNA, 16 bp, synthetic construct
  misc_feature 1..16: note = Probe
  source 1..16: mol_type = other DNA
tcccgggtttcggcac

SEQ ID NO: 55188 - DNA, 19 bp, synthetic construct
  misc_feature 1..19: note = Probe
  source 1..19: mol_type = other DNA
tcccgggtttcggcacttc

SEQ ID NO: 55189 - DNA, 17 bp, synthetic construct
  misc_feature 1..17: note = Probe
  source 1..17: mol_type = other DNA
tcccggtcagggaacca

SEQ ID NO: 55190 - DNA, 16 bp, synthetic construct
  misc_feature 1..16: note = Probe
  source 1..16: mol_type = other DNA
tccctggtggtctagt

SEQ ID NO: 55191 - DNA, 17 bp, synthetic construct
  misc_feature 1..17: note = Probe
  source 1..17: mol_type = other DNA
tccctggtggtctagtg

SEQ ID NO: 55192 - DNA, 18 bp, synthetic construct
  misc_feature 1..18: note = Probe
  source 1..18: mol_type = other DNA
tccctggtggtctagtgg

SEQ ID NO: 55193 - DNA, 20 bp, synthetic construct
  misc_feature 1..20: note = Probe
  source 1..20: mol_type = other DNA
tccctggtggtctagtggct

SEQ ID NO: 55194 - DNA, 22 bp, synthetic construct
  misc_feature 1..22: note = Probe
  source 1..22: mol_type = other DNA
tccctggtggtctagtggctag

SEQ ID NO: 55195 - DNA, 23 bp, synthetic construct
  misc_feature 1..23: note = Probe
  source 1..23: mol_type = other DNA
tccctggtggtctagtggctagg

SEQ ID NO: 55196 - DNA, 24 bp, synthetic construct
  misc_feature 1..24: note = Probe
  source 1..24: mol_type = other DNA
tccctggtggtctagtggctagga

SEQ ID NO: 55197 - DNA, 25 bp, synthetic construct
  misc_feature 1..25: note = Probe
  source 1..25: mol_type = other DNA
tccctggtggtctagtggctaggat

SEQ ID NO: 55198 - DNA, 26 bp, synthetic construct
  misc_feature 1..26: note = Probe
  source 1..26: mol_type = other DNA
tccctggtggtctagtggctaggatt

SEQ ID NO: 55199 - DNA, 31 bp, synthetic construct; identical to SEQ ID NO: 1671
  misc_feature 1..31: note = Probe
  source 1..31: mol_type = other DNA

SEQ ID NO: 55200 - DNA, 33 bp, synthetic construct; identical to SEQ ID NO: 1673
  misc_feature 1..33: note = Probe
  source 1..33: mol_type = other DNA

SEQ ID NO: 55201 - DNA, 19 bp, synthetic construct
  misc_feature 1..19: note = Probe
  source 1..19: mol_type = other DNA
tccctggtggtctagtggt

SEQ ID NO: 55202 - DNA, 20 bp, synthetic construct
  misc_feature 1..20: note = Probe
  source 1..20: mol_type = other DNA
tccctggtggtctagtggtt

SEQ ID NO: 55203 - DNA, 21 bp, synthetic construct
  misc_feature 1..21: note = Probe
  source 1..21: mol_type = other DNA
tccctggtggtctagtggtta

SEQ ID NO: 55204 - DNA, 22 bp, synthetic construct
  misc_feature 1..22: note = Probe
  source 1..22: mol_type = other DNA
tccctggtggtctagtggttag

SEQ ID NO: 55205 - DNA, 23 bp, synthetic construct
  misc_feature 1..23: note = Probe
  source 1..23: mol_type = other DNA
tccctggtggtctagtggttagg

SEQ ID NO: 55206 - DNA, 24 bp, synthetic construct
  misc_feature 1..24: note = Probe
  source 1..24: mol_type = other DNA
tccctggtggtctagtggttagga

SEQ ID NO: 55207 - DNA, 25 bp, synthetic construct
  misc_feature 1..25: note = Probe
  source 1..25: mol_type = other DNA
tccctggtggtctagtggttaggat

SEQ ID NO: 55208 - DNA, 26 bp, synthetic construct
  misc_feature 1..26: note = Probe
  source 1..26: mol_type = other DNA
tccctggtggtctagtggttaggatt

SEQ ID NO: 55209 - DNA, 27 bp, synthetic construct
  misc_feature 1..27: note = Probe
  source 1..27: mol_type = other DNA
tccctggtggtctagtggttaggattc

SEQ ID NO: 55210 - DNA, 28 bp, synthetic construct
  misc_feature 1..28: note = Probe
  source 1..28: mol_type = other DNA
tccctggtggtctagtggttaggattcg

SEQ ID NO: 55211 - DNA, 29 bp, synthetic construct
  misc_feature 1..29: note = Probe
  source 1..29: mol_type = other DNA
tccctggtggtctagtggttaggattcgg

SEQ ID NO: 55212 - DNA, 30 bp, synthetic construct; identical to SEQ ID NO: 7870
  misc_feature 1..30: note = Probe
  source 1..30: mol_type = other DNA

SEQ ID NO: 55213 - DNA, 40 bp, synthetic construct; identical to SEQ ID NO: 1688
  misc_feature 1..40: note = Probe
  source 1..40: mol_type = other DNA

SEQ ID NO: 55214 - DNA, 41 bp, synthetic construct; identical to SEQ ID NO: 7871
  misc_feature 1..41: note = Probe
  source 1..41: mol_type = other DNA

SEQ ID NO: 55215 - DNA, 43 bp, synthetic construct; identical to SEQ ID NO: 7872
  misc_feature 1..43: note = Probe
  source 1..43: mol_type = other DNA

SEQ ID NO: 55216 - DNA, 44 bp, synthetic construct; identical to SEQ ID NO: 7873
  misc_feature 1..44: note = Probe
  source 1..44: mol_type = other DNA

SEQ ID NO: 55217 - DNA, 45 bp, synthetic construct; identical to SEQ ID NO: 7874
  misc_feature 1..45: note = Probe
  source 1..45: mol_type = other DNA

SEQ ID NO: 55218 - DNA, 46 bp, synthetic construct; identical to SEQ ID NO: 7875
  misc_feature 1..46: note = Probe
  source 1..46: mol_type = other DNA

SEQ ID NO: 55219 - DNA, 48 bp, synthetic construct; identical to SEQ ID NO: 7877
  misc_feature 1..48: note = Probe
  source 1..48: mol_type = other DNA

SEQ ID NO: 55220 - DNA, 49 bp, synthetic construct; identical to SEQ ID NO: 1690
  misc_feature 1..49: note = Probe
  source 1..49: mol_type = other DNA

SEQ ID NO: 55221 - DNA, 28 bp, synthetic construct
  misc_feature 1..28: note = Probe
  source 1..28: mol_type = other DNA
tccgtagtgtagtggttatcacgttcgc

SEQ ID NO: 55222 - DNA, 29 bp, synthetic construct
  misc_feature 1..29: note = Probe
  source 1..29: mol_type = other DNA
tccgtagtgtagtggttatcacgttcgcc

SEQ ID NO: 55223 - DNA, 50 bp, synthetic construct; identical to SEQ ID NO: 23965
  misc_feature 1..50: note = Probe
  source 1..50: mol_type = other DNA

SEQ ID NO: 55224 - DNA, 37 bp, synthetic construct
  misc_feature 1..37: note = Probe
  source 1..37: mol_type = other DNA
tccgtagtgtagtggttatcacgttcgcctcacacgc

SEQ ID NO: 55225 - DNA, 50 bp, synthetic construct; identical to SEQ ID NO: 7899
  misc_feature 1..50: note = Probe
  source 1..50: mol_type = other DNA

SEQ ID NO: 55226 - DNA, 19 bp, synthetic construct
  misc_feature 1..19: note = Probe
  source 1..19: mol_type = other DNA
tcctagcctttctattagc

SEQ ID NO: 55227 - DNA, 20 bp, synthetic construct
  misc_feature 1..20: note = Probe
  source 1..20: mol_type = other DNA
tcctcacacggggcacaata

SEQ ID NO: 55228 - DNA, 31 bp, synthetic construct; identical to SEQ ID NO: 41864
  misc_feature 1..31: note = Probe
  source 1..31: mol_type = other DNA

SEQ ID NO: 55229 - DNA, 35 bp, synthetic construct; identical to SEQ ID NO: 23986
  misc_feature 1..35: note = Probe
  source 1..35: mol_type = other DNA

SEQ ID NO: 55230 - DNA, 18 bp, synthetic construct
  misc_feature 1..18: note = Probe
  source 1..18: mol_type = other DNA
tcctcgctggggcctcct

SEQ ID NO: 55231 - DNA, 16 bp, synthetic construct
  misc_feature 1..16: note = Probe
  source 1..16: mol_type = other DNA
tcctcgttagtatagt

SEQ ID NO: 55232 - DNA, 20 bp, synthetic construct
  misc_feature 1..20: note = Probe
  source 1..20: mol_type = other DNA
tcctcgttagtatagtggtg

SEQ ID NO: 55233 - DNA, 21 bp, synthetic construct
  misc_feature 1..21: note = Probe
  source 1..21: mol_type = other DNA
tcctcgttagtatagtggtga

SEQ ID NO: 55234 - DNA, 37 bp, synthetic construct; identical to SEQ ID NO: 1708
  misc_feature 1..37: note = Probe
  source 1..37: mol_type = other DNA

SEQ ID NO: 55235 - DNA, 39 bp, synthetic construct; identical to SEQ ID NO: 1710
  misc_feature 1..39: note = Probe
  source 1..39: mol_type = other DNA

SEQ ID NO: 55236 - DNA, 46 bp, synthetic construct
  misc_feature 1..46: note = Probe
  source 1..46: mol_type = other DNA
tcctcgttagtatagtggtgagtatccccgcctgtcacgcgggaga

SEQ ID NO: 55237 - DNA, 24 bp, synthetic construct
  misc_feature 1..24: note = Probe
  source 1..24: mol_type = other DNA
tcctcgttagtatagtggtgagtg

SEQ ID NO: 55238 - DNA, 23 bp, synthetic construct
  misc_feature 1..23: note = Probe
  source 1..23: mol_type = other DNA
tcctcgttagtatagtggttagt

SEQ ID NO: 55239 - DNA, 26 bp, synthetic construct
  misc_feature 1..26: note = Probe
  source 1..26: mol_type = other DNA
tcctcgttagtatagtggttagtatc

SEQ ID NO: 55240 - DNA, 27 bp, synthetic construct
  misc_feature 1..27: note = Probe
  source 1..27: mol_type = other DNA
tcctcgttagtatagtggttagtatcc

SEQ ID NO: 55241 - DNA, 29 bp, synthetic construct
  misc_feature 1..29: note = Probe
  source 1..29: mol_type = other DNA
tcctcgttagtatagtggttagtatcccc

SEQ ID NO: 55242 - DNA, 30 bp, synthetic construct; identical to SEQ ID NO: 11933
  misc_feature 1..30: note = Probe
  source 1..30: mol_type = other DNA

SEQ ID NO: 55243 - DNA, 31 bp, synthetic construct; identical to SEQ ID NO: 37386
  misc_feature 1..31: note = Probe
  source 1..31: mol_type = other DNA

SEQ ID NO: 55244 - DNA, 35 bp, synthetic construct; identical to SEQ ID NO: 1717
  misc_feature 1..35: note = Probe
  source 1..35: mol_type = other DNA

SEQ ID NO: 55245 - DNA, 50 bp, synthetic construct; identical to SEQ ID NO: 7930
  misc_feature 1..50: note = Probe
  source 1..50: mol_type = other DNA

SEQ ID NO: 55246 - DNA, 22 bp, synthetic construct
  misc_feature 1..22: note = Probe
  source 1..22: mol_type = other DNA
tcgaaaccatcctctgctaggt

SEQ ID NO: 55247 - DNA, 21 bp, synthetic construct
  misc_feature 1..21: note = Probe
  source 1..21: mol_type = other DNA
tcgaaaccatcctctgctatc

SEQ ID NO: 55248 - DNA, 22 bp, synthetic construct
  misc_feature 1..22: note = Probe
  source 1..22: mol_type = other DNA
tcgaaaccgggcggaaacacct

SEQ ID NO: 55249 - DNA, 22 bp, synthetic construct
  misc_feature 1..22: note = Probe
  source 1..22: mol_type = other DNA
tcgaaccccgtccgtgcctgat

SEQ ID NO: 55250 - DNA, 35 bp, synthetic construct; identical to SEQ ID NO: 7941
  misc_feature 1..35: note = Probe
  source 1..35: mol_type = other DNA

SEQ ID NO: 55251 - DNA, 22 bp, synthetic construct
  misc_feature 1..22: note = Probe
  source 1..22: mol_type = other DNA
tcgaatcccaccgctgccacac

SEQ ID NO: 55252 - DNA, 22 bp, synthetic construct
  misc_feature 1..22: note = Probe
  source 1..22: mol_type = other DNA
tcgaatcccaccgctgccaggt

SEQ ID NO: 55253 - DNA, 22 bp, synthetic construct
  misc_feature 1..22: note = Probe
  source 1..22: mol_type = other DNA
tcgaatcccacttctgacacaa

SEQ ID NO: 55254 - DNA, 22 bp, synthetic construct
  misc_feature 1..22: note = Probe
  source 1..22: mol_type = other DNA
tcgaatcccagcggtgcctccg

SEQ ID NO: 55255 - DNA, 20 bp, synthetic construct
  misc_feature 1..20: note = Probe
  source 1..20: mol_type = other DNA
tcgaatcccatcctcgtcgc

SEQ ID NO: 55256 - DNA, 21 bp, synthetic construct
  misc_feature 1..21: note = Probe
  source 1..21: mol_type = other DNA
tcgaatcccatcctcgtcgct

SEQ ID NO: 55257 - DNA, 22 bp, synthetic construct
  misc_feature 1..22: note = Probe
  source 1..22: mol_type = other DNA
tcgaatcccatcctcgtcgctc

SEQ ID NO: 55258 - DNA, 23 bp, synthetic construct
  misc_feature 1..23: note = Probe
  source 1..23: mol_type = other DNA
tcgaatcccatcctcgtcgctcg

SEQ ID NO: 55259 - DNA, 23 bp, synthetic construct
  misc_feature 1..23: note = Probe
  source 1..23: mol_type = other DNA
tcgaatcccatcctcgtcggcta

SEQ ID NO: 55260 - DNA, 17 bp, synthetic construct
  misc_feature 1..17: note = Probe
  source 1..17: mol_type = other DNA
tcgaatccgagtcacgg

SEQ ID NO: 55261 - DNA, 19 bp, synthetic construct
  misc_feature 1..19: note = Probe
  source 1..19: mol_type = other DNA
tcgaatccgagtcacggca

SEQ ID NO: 55262 - DNA, 20 bp, synthetic construct
  misc_feature 1..20: note = Probe
  source 1..20: mol_type = other DNA
tcgaatccgagtcacggcaa

SEQ ID NO: 55263 - DNA, 21 bp, synthetic construct
  misc_feature 1..21: note = Probe
  source 1..21: mol_type = other DNA
tcgaatccgagtcacggcaaa

SEQ ID NO: 55264 - DNA, 22 bp, synthetic construct
  misc_feature 1..22: note = Probe
  source 1..22: mol_type = other DNA
tcgaatccgagtcacggcaaag

SEQ ID NO: 55265 - DNA, 20 bp, synthetic construct
  misc_feature 1..20: note = Probe
  source 1..20: mol_type = other DNA
tcgaatccgagtcacggcag

SEQ ID NO: 55266 - DNA, 21 bp, synthetic construct
  misc_feature 1..21: note = Probe
  source 1..21: mol_type = other DNA
tcgaatccgagtcacggcagg

SEQ ID NO: 55267 - DNA, 22 bp, synthetic construct
  misc_feature 1..22: note = Probe
  source 1..22: mol_type = other DNA
tcgaatccgagtcacggcagga

SEQ ID NO: 55268 - DNA, 22 bp, synthetic construct
  misc_feature 1..22: note = Probe
  source 1..22: mol_type = other DNA
tcgaatccgagtcacggcaggt

SEQ ID NO: 55269 - DNA, 23 bp, synthetic construct
  misc_feature 1..23: note = Probe
  source 1..23: mol_type = other DNA
tcgaatccgagtcacggcaggtg

SEQ ID NO: 55270 - DNA, 24 bp, synthetic construct
  misc_feature 1..24: note = Probe
  source 1..24: mol_type = other DNA
tcgaatccgagtcacggcaggtgg

SEQ ID NO: 55271 - DNA, 20 bp, synthetic construct
  misc_feature 1..20: note = Probe
  source 1..20: mol_type = other DNA
tcgaatccgagtcacggcat

SEQ ID NO: 55272 - DNA, 21 bp, synthetic construct
  misc_feature 1..21: note = Probe
  source 1..21: mol_type = other DNA
tcgaatccgagtcacggcatt

SEQ ID NO: 55273 - DNA, 22 bp, synthetic construct
  misc_feature 1..22: note = Probe
  source 1..22: mol_type = other DNA
tcgaatccgagtcacggcattg

SEQ ID NO: 55274 - DNA, 23 bp, synthetic construct
  misc_feature 1..23: note = Probe
  source 1..23: mol_type = other DNA
tcgaatccgagtcacggcattgt

SEQ ID NO: 55275 - DNA, 24 bp, synthetic construct
  misc_feature 1..24: note = Probe
  source 1..24: mol_type = other DNA
tcgaatccgagtcacggcattgtg

SEQ ID NO: 55276 - DNA, 25 bp, synthetic construct
  misc_feature 1..25: note = Probe
  source 1..25: mol_type = other DNA
tcgaatccgagtcacggcattgtgg

SEQ ID NO: 55277 - DNA, 22 bp, synthetic construct
  misc_feature 1..22: note = Probe
  source 1..22: mol_type = other DNA
tcgaatccggctcgaaggacga

SEQ ID NO: 55278 - DNA, 22 bp, synthetic construct
  misc_feature 1..22: note = Probe
  source 1..22: mol_type = other DNA
tcgaatcctgccgactacggca

SEQ ID NO: 55279 - DNA, 22 bp, synthetic construct
  misc_feature 1..22: note = Probe
  source 1..22: mol_type = other DNA
tcgaatcctgccgactacgtca

SEQ ID NO: 55280 - DNA, 38 bp, synthetic construct; identical to SEQ ID NO: 24034
  misc_feature 1..38: note = Probe
  source 1..38: mol_type = other DNA

SEQ ID NO: 55281 - DNA, 21 bp, synthetic construct
  misc_feature 1..21: note = Probe
  source 1..21: mol_type = other DNA
tcgactcccggtatgggaaca

SEQ ID NO: 55282 - DNA, 22 bp, synthetic construct
  misc_feature 1..22: note = Probe
  source 1..22: mol_type = other DNA
tcgactcccggtatgggaacaa

SEQ ID NO: 55283 - DNA, 23 bp, synthetic construct
  misc_feature 1..23: note = Probe
  source 1..23: mol_type = other DNA
tcgactcccggtatgggaacaaa

SEQ ID NO: 55284 - DNA, 21 bp, synthetic construct
  misc_feature 1..21: note = Probe
  source 1..21: mol_type = other DNA
tcgactcccggtatgggaacg

SEQ ID NO: 55285 - DNA, 20 bp, synthetic construct
  misc_feature 1..20: note = Probe
  source 1..20: mol_type = other DNA
tcgactcccggtgtgggaac

SEQ ID NO: 55286 - DNA, 21 bp, synthetic construct
  misc_feature 1..21: note = Probe
  source 1..21: mol_type = other DNA
tcgactcccggtgtgggaacg

SEQ ID NO: 55287 - DNA, 22 bp, synthetic construct
  misc_feature 1..22: note = Probe
  source 1..22: mol_type = other DNA
tcgactcccggtgtgggaacgc

SEQ ID NO: 55288 - DNA, 23 bp, synthetic construct
  misc_feature 1..23: note = Probe
  source 1..23: mol_type = other DNA
tcgactcccggtgtgggaacgcc

SEQ ID NO: 55289 - DNA, 24 bp, synthetic construct
  misc_feature 1..24: note = Probe
  source 1..24: mol_type = other DNA
tcgactcccggtgtgggaacgccg

SEQ ID NO: 55290 - DNA, 22 bp, synthetic construct
  misc_feature 1..22: note = Probe
  source 1..22: mol_type = other DNA
tcgactcctggctggctcgcga

SEQ ID NO: 55291 - DNA, 22 bp, synthetic construct
  misc_feature 1..22: note = Probe
  source 1..22: mol_type = other DNA
tcgagcccacccagggacgcct

SEQ ID NO: 55292 - DNA, 21 bp, synthetic construct
  misc_feature 1..21: note = Probe
  source 1..21: mol_type = other DNA
tcgagccccagtggaaccacg

SEQ ID NO: 55293 - DNA, 22 bp, synthetic construct
  misc_feature 1..22: note = Probe
  source 1..22: mol_type = other DNA
tcgagccccagtggaaccacgg

SEQ ID NO: 55294 - DNA, 23 bp, synthetic construct
  misc_feature 1..23: note = Probe
  source 1..23: mol_type = other DNA
tcgagccccagtggaaccacggc

SEQ ID NO: 55295 - DNA, 24 bp, synthetic construct
  misc_feature 1..24: note = Probe
  source 1..24: mol_type = other DNA
tcgagccccagtggaaccatagcc

SEQ ID NO: 55296 - DNA, 22 bp, synthetic construct
  misc_feature 1..22: note = Probe
  source 1..22: mol_type = other DNA
tcgagtcccatctgggtcgcgt

SEQ ID NO: 55297 - DNA, 22 bp, synthetic construct
  misc_feature 1..22: note = Probe
  source 1..22: mol_type = other DNA
tcgagtcccttcgtggtcgttg

SEQ ID NO: 55298 - DNA, 22 bp, synthetic construct
  misc_feature 1..22: note = Probe
  source 1..22: mol_type = other DNA
tcgagtcctgccgcggtcgaag

SEQ ID NO: 55299 - DNA, 22 bp, synthetic construct
  misc_feature 1..22: note = Probe
  source 1..22: mol_type = other DNA
tcgatccccagcatctccagtg

SEQ ID NO: 55300 - DNA, 21 bp, synthetic construct
  misc_feature 1..21: note = Probe
  source 1..21: mol_type = other DNA
tcgatccccggcatctccatt

SEQ ID NO: 55301 - DNA, 22 bp, synthetic construct
  misc_feature 1..22: note = Probe
  source 1..22: mol_type = other DNA
tcgatccccggcatctccattg

SEQ ID NO: 55302 - DNA, 23 bp, synthetic construct
  misc_feature 1..23: note = Probe
  source 1..23: mol_type = other DNA
tcgatccccggcatctccattgt

SEQ ID NO: 55303 - DNA, 24 bp, synthetic construct
  misc_feature 1..24: note = Probe
  source 1..24: mol_type = other DNA
tcgatccccggcatctccattgta

SEQ ID NO: 55304 - DNA, 22 bp, synthetic construct
  misc_feature 1..22: note = Probe
  source 1..22: mol_type = other DNA
tcgatccccgtacgggccacga

SEQ ID NO: 55305 - DNA, 22 bp, synthetic construct
  misc_feature 1..22: note = Probe
  source 1..22: mol_type = other DNA
tcgatccccgtacgggccactg

SEQ ID NO: 55306 - DNA, 22 bp, synthetic construct
  misc_feature 1..22: note = Probe
  source 1..22: mol_type = other DNA
tcgatccccgtactggccacgt

SEQ ID NO: 55307 - DNA, 22 bp, synthetic construct
  misc_feature 1..22: note = Probe
  source 1..22: mol_type = other DNA
tcgatcccgggcggaaacaggt

SEQ ID NO: 55308 - DNA, 22 bp, synthetic construct
  misc_feature 1..22: note = Probe
  source 1..22: mol_type = other DNA
tcgatcctcacacggggcacaa

SEQ ID NO: 55309 - DNA, 23 bp, synthetic construct
  misc_feature 1..23: note = Probe
  source 1..23: mol_type = other DNA
tcgatcctcacacggggcacaat

SEQ ID NO: 55310 - DNA, 22 bp, synthetic construct
  misc_feature 1..22: note = Probe
  source 1..22: mol_type = other DNA
tcgatcctcgctggggcctcct

SEQ ID NO: 55311 - DNA, 21 bp, synthetic construct
  misc_feature 1..21: note = Probe
  source 1..21: mol_type = other DNA
tcgatgcccgcatcctccact

SEQ ID NO: 55312 - DNA, 22 bp, synthetic construct
  misc_feature 1..22: note = Probe
  source 1..22: mol_type = other DNA
tcgatgcccgcatcctccactc

SEQ ID NO: 55313 - DNA, 22 bp, synthetic construct
  misc_feature 1..22: note = Probe
  source 1..22: mol_type = other DNA
tcgatgcccgcattctccatac

SEQ ID NO: 55314 - DNA, 22 bp, synthetic construct
  misc_feature 1..22: note = Probe
  source 1..22: mol_type = other DNA
tcgattccccgacggggagaaa

SEQ ID NO: 55315 - DNA, 22 bp, synthetic construct
  misc_feature 1..22: note = Probe
  source 1..22: mol_type = other DNA
tcgattccccgacggggaggca

SEQ ID NO: 55316 - DNA, 22 bp, synthetic construct
  misc_feature 1..22: note = Probe
  source 1..22: mol_type = other DNA
tcgattcccggccaacgcaagt

SEQ ID NO: 55317 - DNA, 21 bp, synthetic construct
  misc_feature 1..21: note = Probe
  source 1..21: mol_type = other DNA
tcgattcccggccaacgcagc

SEQ ID NO: 55318 - DNA, 22 bp, synthetic construct
  misc_feature 1..22: note = Probe
  source 1..22: mol_type = other DNA
tcgattcccggccaacgcagtg

SEQ ID NO: 55319 - DNA, 23 bp, synthetic construct
  misc_feature 1..23: note = Probe
  source 1..23: mol_type = other DNA
tcgattcccggccaacgcatgcg

SEQ ID NO: 55320 - DNA, 22 bp, synthetic construct
  misc_feature 1..22: note = Probe
  source 1..22: mol_type = other DNA
tcgattcccggccaatgcacga

SEQ ID NO: 55321 - DNA, 22 bp, synthetic construct
  misc_feature 1..22: note = Probe
  source 1..22: mol_type = other DNA
tcgattcccggccaatgcagca

SEQ ID NO: 55322 - DNA, 22 bp, synthetic construct
  misc_feature 1..22: note = Probe
  source 1..22: mol_type = other DNA
tcgattcccggcccatgcagca

SEQ ID NO: 55323 - DNA, 22 bp, synthetic construct
  misc_feature 1..22: note = Probe
  source 1..22: mol_type = other DNA
tcgattcccgggcggcgcactt

SEQ ID NO: 55324 - DNA, 22 bp, synthetic construct
  misc_feature 1..22: note = Probe
  source 1..22: mol_type = other DNA
tcgattcccggtcagggaacaa

SEQ ID NO: 55325 - DNA, 22 bp, synthetic construct
  misc_feature 1..22: note = Probe
  source 1..22: mol_type = other DNA
tcgattctcatagtcctagaaa

SEQ ID NO: 55326 - DNA, 46 bp, synthetic construct; identical to SEQ ID NO: 7988
  misc_feature 1..46: note = Probe
  source 1..46: mol_type = other DNA

SEQ ID NO: 55327 - DNA, 50 bp, synthetic construct; identical to SEQ ID NO: 7991
  misc_feature 1..50: note = Probe
  source 1..50: mol_type = other DNA

SEQ ID NO: 55328 - DNA, 22 bp, synthetic construct
  misc_feature 1..22: note = Probe
  source 1..22: mol_type = other DNA
tcgcctgccacgcgggaggccc

SEQ ID NO: 55329 - DNA, 26 bp, synthetic construct
  misc_feature 1..26: note = Probe
  source 1..26: mol_type = other DNA
tcgcctgccacgcgggaggcccgggt

SEQ ID NO: 55330 - DNA, 27 bp, synthetic construct
  misc_feature 1..27: note = Probe
  source 1..27: mol_type = other DNA
tcgcctgccacgcgggaggcccgggtt

SEQ ID NO: 55331 - DNA, 24 bp, synthetic construct
  misc_feature 1..24: note = Probe
  source 1..24: mol_type = other DNA
tcggcgctctcaccgccgcggccc

SEQ ID NO: 55332 - DNA, 24 bp, synthetic construct
  misc_feature 1..24: note = Probe
  source 1..24: mol_type = other DNA
tcgggtgcgagaggtcccgggttc

SEQ ID NO: 55333 - DNA, 17 bp, synthetic construct
  misc_feature 1..17: note = Probe
  source 1..17: mol_type = other DNA
tcggtagagcatcagac

SEQ ID NO: 55334 - DNA, 27 bp, synthetic construct
  misc_feature 1..27: note = Probe
  source 1..27: mol_type = other DNA
tcggtagagcatgggactcttaatccc

SEQ ID NO: 55335 - DNA, 22 bp, synthetic construct
  misc_feature 1..22: note = Probe
  source 1..22: mol_type = other DNA
tcgtaaacaggagatcctgggt

SEQ ID NO: 55336 - DNA, 23 bp, synthetic construct
  misc_feature 1..23: note = Probe
  source 1..23: mol_type = other DNA
tcgtaaacaggagatcctgggtt

SEQ ID NO: 55337 - DNA, 29 bp, synthetic construct
  misc_feature 1..29: note = Probe
  source 1..29: mol_type = other DNA
tcgtggttgtagtccgtgcgagaataatg

SEQ ID NO: 55338 - DNA, 27 bp, synthetic construct
  misc_feature 1..27: note = Probe
  source 1..27: mol_type = other DNA
tcgttagtatagtggtgagtatccccg

SEQ ID NO: 55339 - DNA, 28 bp, synthetic construct
  misc_feature 1..28: note = Probe
  source 1..28: mol_type = other DNA
tcgttagtatagtggtgagtatccccgc

SEQ ID NO: 55340 - DNA, 27 bp, synthetic construct
  misc_feature 1..27: note = Probe
  source 1..27: mol_type = other DNA
tcgttggtctaggggtatgattctcgc

SEQ ID NO: 55341 - DNA, 35 bp, synthetic construct; identical to SEQ ID NO: 7996
  misc_feature 1..35: note = Probe
  source 1..35: mol_type = other DNA

SEQ ID NO: 55342 - DNA, 24 bp, synthetic construct
  misc_feature 1..24: note = Probe
  source 1..24: mol_type = other DNA
tctaacaacatggctttctcaact

SEQ ID NO: 55343 - DNA, 20 bp, synthetic construct
  misc_feature 1..20: note = Probe
  source 1..20: mol_type = other DNA
tctaggggtatgattctcgc

SEQ ID NO: 55344 - DNA, 21 bp, synthetic construct
  misc_feature 1..21: note = Probe
  source 1..21: mol_type = other DNA
tctaggggtatgattctcgct

SEQ ID NO: 55345 - DNA, 20 bp, synthetic construct
  misc_feature 1..20: note = Probe
  source 1..20: mol_type = other DNA
tctaggggtatgattctcgg

SEQ ID NO: 55346 - DNA, 21 bp, synthetic construct
  misc_feature 1..21: note = Probe
  source 1..21: mol_type = other DNA
tctaggggtatgattctcggt

SEQ ID NO: 55347 - DNA, 25 bp, synthetic construct
  misc_feature 1..25: note = Probe
  source 1..25: mol_type = other DNA
tctagtggttaggattcggcgctct

SEQ ID NO: 55348 - DNA, 27 bp, synthetic construct
  misc_feature 1..27: note = Probe
  source 1..27: mol_type = other DNA
tctagtggttaggattcggcgctctca

SEQ ID NO: 55349 - DNA, 38 bp, synthetic construct
  misc_feature 1..38: note = Probe
  source 1..38: mol_type = other DNA
tctagtggttaggattcggcgctctcaccgccgcggcc

SEQ ID NO: 55350 - DNA, 40 bp, synthetic construct
  misc_feature 1..40: note = Probe
  source 1..40: mol_type = other DNA
tctagtggttaggattcggcgctctcaccgccgcggcccg

SEQ ID NO: 55351 - DNA, 43 bp, synthetic construct; identical to SEQ ID NO: 34782
  misc_feature 1..43: note = Probe
  source 1..43: mol_type = other DNA

SEQ ID NO: 55352 - DNA, 22 bp, synthetic construct
  misc_feature 1..22: note = Probe
  source 1..22: mol_type = other DNA
tctcaccgccgcggcccgggtt

SEQ ID NO: 55353 - DNA, 23 bp, synthetic construct
  misc_feature 1..23: note = Probe
  source 1..23: mol_type = other DNA
tctcaccgccgcggcccgggttc

SEQ ID NO: 55354 - DNA, 36 bp, synthetic construct; identical to SEQ ID NO: 8002
  misc_feature 1..36: note = Probe
  source 1..36: mol_type = other DNA

SEQ ID NO: 55355 - DNA, 22 bp, synthetic construct
  misc_feature 1..22: note = Probe
  source 1..22: mol_type = other DNA
tctcataatctgaaggtcctga

SEQ ID NO: 55356 - DNA, 23 bp, synthetic construct
  misc_feature 1..23: note = Probe
  source 1..23: mol_type = other DNA
tctcataatctgaaggtcctgag

SEQ ID NO: 55357 - DNA, 24 bp, synthetic construct
  misc_feature 1..24: note = Probe
  source 1..24: mol_type = other DNA
tctcataatctgaaggtcctgagt

SEQ ID NO: 55358 - DNA, 21 bp, synthetic construct
  misc_feature 1..21: note = Probe
  source 1..21: mol_type = other DNA
tctcataatctgaaggtcgtg

SEQ ID NO: 55359 - DNA, 22 bp, synthetic construct
  misc_feature 1..22: note = Probe
  source 1..22: mol_type = other DNA
tctcataatctgaaggtcgtga

SEQ ID NO: 55360 - DNA, 23 bp, synthetic construct
  misc_feature 1..23: note = Probe
  source 1..23: mol_type = other DNA
tctcataatctgaaggtcgtgag

SEQ ID NO: 55361 - DNA, 25 bp, synthetic construct
  misc_feature 1..25: note = Probe
  source 1..25: mol_type = other DNA
tctcataatctgaaggtcgtgagtt

SEQ ID NO: 55362 - DNA, 28 bp, synthetic construct
  misc_feature 1..28: note = Probe
  source 1..28: mol_type = other DNA
tctcgcctgccacgcgggaggcccgggt

SEQ ID NO: 55363 - DNA, 25 bp, synthetic construct
  misc_feature 1..25: note = Probe
  source 1..25: mol_type = other DNA
tctcgcttagggtgcgagaggtccc

SEQ ID NO: 55364 - DNA, 25 bp, synthetic construct
  misc_feature 1..25: note = Probe
  source 1..25: mol_type = other DNA
tctcgcttcgggtgcgagaggtccc

SEQ ID NO: 55365 - DNA, 25 bp, synthetic construct
  misc_feature 1..25: note = Probe
  source 1..25: mol_type = other DNA
tctcgctttgggtgcgagaggtccc

SEQ ID NO: 55366 - DNA, 24 bp, synthetic construct
  misc_feature 1..24: note = Probe
  source 1..24: mol_type = other DNA
tctcgtaaacaggagatcctgggt

SEQ ID NO: 55367 - DNA, 38 bp, synthetic construct
  misc_feature 1..38: note = Probe
  source 1..38: mol_type = other DNA
tctgaatccagcgatccgagttcaaatctcggtggaac

SEQ ID NO: 55368 - DNA, 35 bp, synthetic construct; identical to SEQ ID NO: 8008
  misc_feature 1..35: note = Probe
  source 1..35: mol_type = other DNA

SEQ ID NO: 55369 - DNA, 36 bp, synthetic construct; identical to SEQ ID NO: 8009
  misc_feature 1..36: note = Probe
  source 1..36: mol_type = other DNA

SEQ ID NO: 55370 - DNA, 37 bp, synthetic construct; identical to SEQ ID NO: 8010
  misc_feature 1..37: note = Probe
  source 1..37: mol_type = other DNA

SEQ ID NO: 55371 - DNA, 22 bp, synthetic construct
  misc_feature 1..22: note = Probe
  source 1..22: mol_type = other DNA
tctgagggtccagggttcaagt

SEQ ID NO: 55372 - DNA, 45 bp, synthetic construct; identical to SEQ ID NO: 50781
  misc_feature 1..45: note = Probe
  source 1..45: mol_type = other DNA

SEQ ID NO: 55373 - DNA, 17 bp, synthetic construct
  misc_feature 1..17: note = Probe
  source 1..17: mol_type = other DNA
tcttgcgacccgggttc

SEQ ID NO: 55374 - DNA, 25 bp, synthetic construct
  misc_feature 1..25: note = Probe
  source 1..25: mol_type = other DNA
tgaaaacctttttccaaggacaaat

SEQ ID NO: 55375 - DNA, 19 bp, synthetic construct
  misc_feature 1..19: note = Probe
  source 1..19: mol_type = other DNA
tgaatccagcgatccgagt

SEQ ID NO: 55376 - DNA, 21 bp, synthetic construct
  misc_feature 1..21: note = Probe
  source 1..21: mol_type = other DNA
tgaatccagcgatccgagttc

SEQ ID NO: 55377 - DNA, 22 bp, synthetic construct
  misc_feature 1..22: note = Probe
  source 1..22: mol_type = other DNA
tgaatccagcgatccgagttca

SEQ ID NO: 55378 - DNA, 39 bp, synthetic construct; identical to SEQ ID NO: 8031
  misc_feature 1..39: note = Probe
  source 1..39: mol_type = other DNA

SEQ ID NO: 55379 - DNA, 40 bp, synthetic construct; identical to SEQ ID NO: 8032
  misc_feature 1..40: note = Probe
  source 1..40: mol_type = other DNA

SEQ ID NO: 55380 - DNA, 41 bp, synthetic construct; identical to SEQ ID NO: 8033
  misc_feature 1..41: note = Probe
  source 1..41: mol_type = other DNA

SEQ ID NO: 55381 - DNA, 39 bp, synthetic construct; identical to SEQ ID NO: 8035
  misc_feature 1..39: note = Probe
  source 1..39: mol_type = other DNA

SEQ ID NO: 55382 - DNA, 21 bp, synthetic construct
  misc_feature 1..21: note = Probe
  source 1..21: mol_type = other DNA
tgaatctgacaacagaggctt

SEQ ID NO: 55383 - DNA, 25 bp, synthetic construct
  misc_feature 1..25: note = Probe
  source 1..25: mol_type = other DNA
tgaatctgacaacagaggcttacga

SEQ ID NO: 55384 - DNA, 26 bp, synthetic construct
  misc_feature 1..26: note = Probe
  source 1..26: mol_type = other DNA
tgaatctgacaacagaggcttacgac

SEQ ID NO: 55385 - DNA, 27 bp, synthetic construct
  misc_feature 1..27: note = Probe
  source 1..27: mol_type = other DNA
tgaatctgacaacagaggcttacgacc

SEQ ID NO: 55386 - DNA, 28 bp, synthetic construct
  misc_feature 1..28: note = Probe
  source 1..28: mol_type = other DNA
tgaatctgacaacagaggcttacgaccc

SEQ ID NO: 55387 - DNA, 29 bp, synthetic construct
  misc_feature 1..29: note = Probe
  source 1..29: mol_type = other DNA
tgaatctgacaacagaggcttacgacccc

SEQ ID NO: 55388 - DNA, 30 bp, synthetic construct; identical to SEQ ID NO: 1734
  misc_feature 1..30: note = Probe
  source 1..30: mol_type = other DNA

SEQ ID NO: 55389 - DNA, 31 bp, synthetic construct; identical to SEQ ID NO: 1735
  misc_feature 1..31: note = Probe
  source 1..31: mol_type = other DNA

SEQ ID NO: 55390 - DNA, 33 bp, synthetic construct; identical to SEQ ID NO: 1737
  misc_feature 1..33: note = Probe
  source 1..33: mol_type = other DNA

SEQ ID NO: 55391 - DNA, 34 bp, synthetic construct; identical to SEQ ID NO: 1738
  misc_feature 1..34: note = Probe
  source 1..34: mol_type = other DNA

SEQ ID NO: 55392 - DNA, 35 bp, synthetic construct; identical to SEQ ID NO: 1739
  misc_feature 1..35: note = Probe
  source 1..35: mol_type = other DNA

SEQ ID NO: 55393 - DNA, 37 bp, synthetic construct; identical to SEQ ID NO: 1741
  misc_feature 1..37: note = Probe
  source 1..37: mol_type = other DNA

SEQ ID NO: 55394 - DNA, 39 bp, synthetic construct; identical to SEQ ID NO: 8042
  misc_feature 1..39: note = Probe
  source 1..39: mol_type = other DNA

SEQ ID NO: 55395 - DNA, 40 bp, synthetic construct; identical to SEQ ID NO: 8043
  misc_feature 1..40: note = Probe
  source 1..40: mol_type = other DNA

SEQ ID NO: 55396 - DNA, 41 bp, synthetic construct; identical to SEQ ID NO: 8044
  misc_feature 1..41: note = Probe
  source 1..41: mol_type = other DNA

SEQ ID NO: 55397 - DNA, 42 bp, synthetic construct; identical to SEQ ID NO: 8045
  misc_feature 1..42: note = Probe
  source 1..42: mol_type = other DNA

SEQ ID NO: 55398 - DNA, 43 bp, synthetic construct; identical to SEQ ID NO: 8046
  misc_feature 1..43: note = Probe
  source 1..43: mol_type = other DNA

SEQ ID NO: 55399 - DNA, 44 bp, synthetic construct; identical to SEQ ID NO: 8047
  misc_feature 1..44: note = Probe
  source 1..44: mol_type = other DNA

SEQ ID NO: 55400 - DNA, 50 bp, synthetic construct; identical to SEQ ID NO: 50803
  misc_feature 1..50: note = Probe
  source 1..50: mol_type = other DNA

SEQ ID NO: 55401 - DNA, 29 bp, synthetic construct
  misc_feature 1..29: note = Probe
  source 1..29: mol_type = other DNA
tgacaacagaggcttacgaccccttattt

SEQ ID NO: 55402 - DNA, 32 bp, synthetic construct; identical to SEQ ID NO: 1745
  misc_feature 1..32: note = Probe
  source 1..32: mol_type = other DNA

SEQ ID NO: 55403 - DNA, 33 bp, synthetic construct; identical to SEQ ID NO: 8057
  misc_feature 1..33: note = Probe
  source 1..33: mol_type = other DNA

SEQ ID NO: 55404 - DNA, 34 bp, synthetic construct; identical to SEQ ID NO: 8058
  misc_feature 1..34: note = Probe
  source 1..34: mol_type = other DNA

SEQ ID NO: 55405 - DNA, 35 bp, synthetic construct; identical to SEQ ID NO: 8059
  misc_feature 1..35: note = Probe
  source 1..35: mol_type = other DNA

SEQ ID NO: 55406 - DNA, 26 bp, synthetic construct
  misc_feature 1..26: note = Probe
  source 1..26: mol_type = other DNA
tgactacggatcagaagattccaggt

SEQ ID NO: 55407 - DNA, 27 bp, synthetic construct
  misc_feature 1..27: note = Probe
  source 1..27: mol_type = other DNA
tgactacggatcagaagattccaggtt

SEQ ID NO: 55408 - DNA, 26 bp, synthetic construct
  misc_feature 1..26: note = Probe
  source 1..26: mol_type = other DNA
tgactacggatcagaagattctaggt

SEQ ID NO: 55409 - DNA, 27 bp, synthetic construct
  misc_feature 1..27: note = Probe
  source 1..27: mol_type = other DNA
tgactacggatcagaagattctaggtt

SEQ ID NO: 55410 - DNA, 31 bp, synthetic construct; identical to SEQ ID NO: 8063
  misc_feature 1..31: note = Probe
  source 1..31: mol_type = other DNA

SEQ ID NO: 55411 - DNA, 33 bp, synthetic construct
  misc_feature 1..33: note = Probe
  source 1..33: mol_type = other DNA
tgagctaaacctagccccaaacccactccacct

SEQ ID NO: 55412 - DNA, 50 bp, synthetic construct
  misc_feature 1..50: note = Probe
  source 1..50: mol_type = other DNA
tgataaaagagttactttgatagagtaaataataggagcttaaaccccct

SEQ ID NO: 55413 - DNA, 22 bp, synthetic construct
  misc_feature 1..22: note = Probe
  source 1..22: mol_type = other DNA
tgataatcatatttaccaaatg

SEQ ID NO: 55414 - DNA, 44 bp, synthetic construct; identical to SEQ ID NO: 8071
  misc_feature 1..44: note = Probe
  source 1..44: mol_type = other DNA

SEQ ID NO: 55415 - DNA, 32 bp, synthetic construct; identical to SEQ ID NO: 8074
  misc_feature 1..32: note = Probe
  source 1..32: mol_type = other DNA

SEQ ID NO: 55416 - DNA, 28 bp, synthetic construct
  misc_feature 1..28: note = Probe
  source 1..28: mol_type = other DNA
tgattctcgcttagggtgcgagaggtcc

SEQ ID NO: 55417 - DNA, 29 bp, synthetic construct
  misc_feature 1..29: note = Probe
  source 1..29: mol_type = other DNA
tgattctcgcttagggtgcgagaggtccc

SEQ ID NO: 55418 - DNA, 30 bp, synthetic construct; identical to SEQ ID NO: 24223
  misc_feature 1..30: note = Probe
  source 1..30: mol_type = other DNA

SEQ ID NO: 55419 - DNA, 31 bp, synthetic construct
  misc_feature 1..31: note = Probe
  source 1..31: mol_type = other DNA
tgattctcgcttagggtgcgagaggtcccgg

SEQ ID NO: 55420 - DNA, 28 bp, synthetic construct
  misc_feature 1..28: note = Probe
  source 1..28: mol_type = other DNA
tgattctcgcttcgggtgcgagaggtcc

SEQ ID NO: 55421 - DNA, 29 bp, synthetic construct
  misc_feature 1..29: note = Probe
  source 1..29: mol_type = other DNA
tgattctcgcttcgggtgcgagaggtccc

SEQ ID NO: 55422 - DNA, 30 bp, synthetic construct; identical to SEQ ID NO: 24225
  misc_feature 1..30: note = Probe
  source 1..30: mol_type = other DNA

SEQ ID NO: 55423 - DNA, 31 bp, synthetic construct
  misc_feature 1..31: note = Probe
  source 1..31: mol_type = other DNA
tgattctcgcttcgggtgcgagaggtcccgg

SEQ ID NO: 55424 - DNA, 28 bp, synthetic construct
  misc_feature 1..28: note = Probe
  source 1..28: mol_type = other DNA
tgattctcgctttgggtgcgagaggtcc

SEQ ID NO: 55425 - DNA, 29 bp, synthetic construct
  misc_feature 1..29: note = Probe
  source 1..29: mol_type = other DNA
tgattctcgctttgggtgcgagaggtccc

SEQ ID NO: 55426 - DNA, 30 bp, synthetic construct; identical to SEQ ID NO: 24227
  misc_feature 1..30: note = Probe
  source 1..30: mol_type = other DNA

SEQ ID NO: 55427 - DNA, 31 bp, synthetic construct
  misc_feature 1..31: note = Probe
  source 1..31: mol_type = other DNA
tgattctcgctttgggtgcgagaggtcccgg

SEQ ID NO: 55428 - DNA, 29 bp, synthetic construct
  misc_feature 1..29: note = Probe
  source 1..29: mol_type = other DNA
tgattctcggtttgggtccgagaggtccc

SEQ ID NO: 55429 - DNA, 30 bp, synthetic construct
  misc_feature 1..30: note = Probe
  source 1..30: mol_type = other DNA
tgattctcggtttgggtccgagaggtcccg

SEQ ID NO: 55430 - DNA, 41 bp, synthetic construct; identical to SEQ ID NO: 8081
  misc_feature 1..41: note = Probe
  source 1..41: mol_type = other DNA

SEQ ID NO: 55431 - DNA, 42 bp, synthetic construct; identical to SEQ ID NO: 8082
  misc_feature 1..42: note = Probe
  source 1..42: mol_type = other DNA

SEQ ID NO: 55432 - DNA, 29 bp, synthetic construct
  misc_feature 1..29: note = Probe
  source 1..29: mol_type = other DNA
tgcagagtggggttttgcagtccttagct

SEQ ID NO: 55433 - DNA, 23 bp, synthetic construct
  misc_feature 1..23: note = Probe
  source 1..23: mol_type = other DNA
tgccacgcgggaggcccgggttc

SEQ ID NO: 55434 - DNA, 38 bp, synthetic construct; identical to SEQ ID NO: 42046
  misc_feature 1..38: note = Probe
  source 1..38: mol_type = other DNA

SEQ ID NO: 55435 - DNA, 39 bp, synthetic construct; identical to SEQ ID NO: 42047
  misc_feature 1..39: note = Probe
  source 1..39: mol_type = other DNA

SEQ ID NO: 55436 - DNA, 40 bp, synthetic construct
  misc_feature 1..40: note = Probe
  source 1..40: mol_type = other DNA
tgccacgcgggaggcccgggttcgattcccggccaatgca

SEQ ID NO: 55437 - DNA, 50 bp, synthetic construct
  misc_feature 1..50: note = Probe
  source 1..50: mol_type = other DNA
tgccacgcgggaggcccgggttcgattcccggccaatgcactttcatttt

SEQ ID NO: 55438 - DNA, 23 bp, synthetic construct
  misc_feature 1..23: note = Probe
  source 1..23: mol_type = other DNA
tgccacgcgggaggcccgggttt

SEQ ID NO: 55439 - DNA, 24 bp, synthetic construct
  misc_feature 1..24: note = Probe
  source 1..24: mol_type = other DNA
tgccacgcgggaggcccgggtttg

SEQ ID NO: 55440 - DNA, 21 bp, synthetic construct
  misc_feature 1..21: note = Probe
  source 1..21: mol_type = other DNA
tgcccccatgtctaacaacat

SEQ ID NO: 55441 - DNA, 25 bp, synthetic construct
  misc_feature 1..25: note = Probe
  source 1..25: mol_type = other DNA
tgcccccatgtctaacaacatggct

SEQ ID NO: 55442 - DNA, 26 bp, synthetic construct
  misc_feature 1..26: note = Probe
  source 1..26: mol_type = other DNA
tgcccccatgtctaacaacatggctt

SEQ ID NO: 55443 - DNA, 27 bp, synthetic construct
  misc_feature 1..27: note = Probe
  source 1..27: mol_type = other DNA
tgcccccatgtctaacaacatggcttt

SEQ ID NO: 55444 - DNA, 28 bp, synthetic construct
  misc_feature 1..28: note = Probe
  source 1..28: mol_type = other DNA
tgcccccatgtctaacaacatggctttc

SEQ ID NO: 55445 - DNA, 29 bp, synthetic construct
  misc_feature 1..29: note = Probe
  source 1..29: mol_type = other DNA
tgcccccatgtctaacaacatggctttct

SEQ ID NO: 55446 - DNA, 30 bp, synthetic construct; identical to SEQ ID NO: 8103
  misc_feature 1..30: note = Probe
  source 1..30: mol_type = other DNA

SEQ ID NO: 55447 - DNA, 31 bp, synthetic construct; identical to SEQ ID NO: 8104
  misc_feature 1..31: note = Probe
  source 1..31: mol_type = other DNA

SEQ ID NO: 55448 - DNA, 32 bp, synthetic construct; identical to SEQ ID NO: 8105
  misc_feature 1..32: note = Probe
  source 1..32: mol_type = other DNA

SEQ ID NO: 55449 - DNA, 33 bp, synthetic construct; identical to SEQ ID NO: 8106
  misc_feature 1..33: note = Probe
  source 1..33: mol_type = other DNA

SEQ ID NO: 55450 - DNA, 34 bp, synthetic construct; identical to SEQ ID NO: 8107
  misc_feature 1..34: note = Probe
  source 1..34: mol_type = other DNA

SEQ ID NO: 55451 - DNA, 29 bp, synthetic construct
  misc_feature 1..29: note = Probe
  source 1..29: mol_type = other DNA
tgcccctcatttacataaatattatacta

SEQ ID NO: 55452 - DNA, 17 bp, synthetic construct
  misc_feature 1..17: note = Probe
  source 1..17: mol_type = other DNA
tgcccgcatcctccact

SEQ ID NO: 55453 - DNA, 23 bp, synthetic construct
  misc_feature 1..23: note = Probe
  source 1..23: mol_type = other DNA
tgccgtgatcgtatagtggttag

SEQ ID NO: 55454 - DNA, 24 bp, synthetic construct
  misc_feature 1..24: note = Probe
  source 1..24: mol_type = other DNA
tgccgtgatcgtatagtggttagt

SEQ ID NO: 55455 - DNA, 27 bp, synthetic construct
  misc_feature 1..27: note = Probe
  source 1..27: mol_type = other DNA
tgccgtgatcgtatagtggttagtact

SEQ ID NO: 55456 - DNA, 31 bp, synthetic construct; identical to SEQ ID NO: 8115
  misc_feature 1..31: note = Probe
  source 1..31: mol_type = other DNA

SEQ ID NO: 55457 - DNA, 32 bp, synthetic construct; identical to SEQ ID NO: 8116
  misc_feature 1..32: note = Probe
  source 1..32: mol_type = other DNA

SEQ ID NO: 55458 - DNA, 34 bp, synthetic construct; identical to SEQ ID NO: 8117
  misc_feature 1..34: note = Probe
  source 1..34: mol_type = other DNA

SEQ ID NO: 55459 - DNA, 36 bp, synthetic construct; identical to SEQ ID NO: 1756
  misc_feature 1..36: note = Probe
  source 1..36: mol_type = other DNA

SEQ ID NO: 55460 - DNA, 36 bp, synthetic construct; identical to SEQ ID NO: 8127
  misc_feature 1..36: note = Probe
  source 1..36: mol_type = other DNA

SEQ ID NO: 55461 - DNA, 37 bp, synthetic construct; identical to SEQ ID NO: 8128
  misc_feature 1..37: note = Probe
  source 1..37: mol_type = other DNA

SEQ ID NO: 55462 - DNA, 38 bp, synthetic construct; identical to SEQ ID NO: 8129
  misc_feature 1..38: note = Probe
  source 1..38: mol_type = other DNA

SEQ ID NO: 55463 - DNA, 39 bp, synthetic construct; identical to SEQ ID NO: 8130
  misc_feature 1..39: note = Probe
  source 1..39: mol_type = other DNA

SEQ ID NO: 55464 - DNA, 40 bp, synthetic construct; identical to SEQ ID NO: 8131
  misc_feature 1..40: note = Probe
  source 1..40: mol_type = other DNA

SEQ ID NO: 55465 - DNA, 42 bp, synthetic construct; identical to SEQ ID NO: 24325
  misc_feature 1..42: note = Probe
  source 1..42: mol_type = other DNA

SEQ ID NO: 55466 - DNA, 43 bp, synthetic construct; identical to SEQ ID NO: 8133
  misc_feature 1..43: note = Probe
  source 1..43: mol_type = other DNA

SEQ ID NO: 55467 - DNA, 44 bp, synthetic construct; identical to SEQ ID NO: 8134
  misc_feature 1..44: note = Probe
  source 1..44: mol_type = other DNA

SEQ ID NO: 55468 - DNA, 25 bp, synthetic construct
  misc_feature 1..25: note = Probe
  source 1..25: mol_type = other DNA
tgctaataacgccaaggtcgcgggt

SEQ ID NO: 55469 - DNA, 26 bp, synthetic construct
  misc_feature 1..26: note = Probe
  source 1..26: mol_type = other DNA
tgctaataacgccaaggtcgcgggtt

SEQ ID NO: 55470 - DNA, 36 bp, synthetic construct; identical to SEQ ID NO: 8139
  misc_feature 1..36: note = Probe
  source 1..36: mol_type = other DNA

SEQ ID NO: 55471 - DNA, 38 bp, synthetic construct; identical to SEQ ID NO: 8140
  misc_feature 1..38: note = Probe
  source 1..38: mol_type = other DNA

SEQ ID NO: 55472 - DNA, 40 bp, synthetic construct; identical to SEQ ID NO: 8142
  misc_feature 1..40: note = Probe
  source 1..40: mol_type = other DNA

SEQ ID NO: 55473 - DNA, 41 bp, synthetic construct; identical to SEQ ID NO: 8143
  misc_feature 1..41: note = Probe
  source 1..41: mol_type = other DNA

SEQ ID NO: 55474 - DNA, 43 bp, synthetic construct; identical to SEQ ID NO: 8145
  misc_feature 1..43: note = Probe
  source 1..43: mol_type = other DNA

SEQ ID NO: 55475 - DNA, 27 bp, synthetic construct
  misc_feature 1..27: note = Probe
  source 1..27: mol_type = other DNA
tggagttaaagactttttctctgattt

SEQ ID NO: 55476 - DNA, 27 bp, synthetic construct
  misc_feature 1..27: note = Probe
  source 1..27: mol_type = other DNA
tggcctcctaagccagggattgtgggt

SEQ ID NO: 55477 - DNA, 21 bp, synthetic construct
  misc_feature 1..21: note = Probe
  source 1..21: mol_type = other DNA
tgggtgcgagaggtcccgggt

SEQ ID NO: 55478 - DNA, 22 bp, synthetic construct
  misc_feature 1..22: note = Probe
  source 1..22: mol_type = other DNA
tgggtgcgagaggtcccgggtt

SEQ ID NO: 55479 - DNA, 50 bp, synthetic construct
  misc_feature 1..50: note = Probe
  source 1..50: mol_type = other DNA
tgggtgcgagaggtcccgggttcaaatcccggacgagcccccttttcctt

SEQ ID NO: 55480 - DNA, 40 bp, synthetic construct; identical to SEQ ID NO: 8164
  misc_feature 1..40: note = Probe
  source 1..40: mol_type = other DNA

SEQ ID NO: 55481 - DNA, 16 bp, synthetic construct
  misc_feature 1..16: note = Probe
  source 1..16: mol_type = other DNA
tggtagaattctcgcc

SEQ ID NO: 55482 - DNA, 18 bp, synthetic construct
  misc_feature 1..18: note = Probe
  source 1..18: mol_type = other DNA
tggtagaattctcgcctg

SEQ ID NO: 55483 - DNA, 19 bp, synthetic construct
  misc_feature 1..19: note = Probe
  source 1..19: mol_type = other DNA
tggtagaattctcgcctgc

SEQ ID NO: 55484 - DNA, 20 bp, synthetic construct
  misc_feature 1..20: note = Probe
  source 1..20: mol_type = other DNA
tggtagaattctcgcctgcc

SEQ ID NO: 55485 - DNA, 21 bp, synthetic construct
  misc_feature 1..21: note = Probe
  source 1..21: mol_type = other DNA
tggtagaattctcgcctgcca

SEQ ID NO: 55486 - DNA, 22 bp, synthetic construct
  misc_feature 1..22: note = Probe
  source 1..22: mol_type = other DNA
tggtagaattctcgcctgccac

SEQ ID NO: 55487 - DNA, 25 bp, synthetic construct
  misc_feature 1..25: note = Probe
  source 1..25: mol_type = other DNA
tggtagaattctcgcctgccacgcg

SEQ ID NO: 55488 - DNA, 34 bp, synthetic construct; identical to SEQ ID NO: 24375
  misc_feature 1..34: note = Probe
  source 1..34: mol_type = other DNA

SEQ ID NO: 55489 - DNA, 37 bp, synthetic construct; identical to SEQ ID NO: 24376
  misc_feature 1..37: note = Probe
  source 1..37: mol_type = other DNA

SEQ ID NO: 55490 - DNA, 38 bp, synthetic construct; identical to SEQ ID NO: 24377
  misc_feature 1..38: note = Probe
  source 1..38: mol_type = other DNA

SEQ ID NO: 55491 - DNA, 28 bp, synthetic construct
  misc_feature 1..28: note = Probe
  source 1..28: mol_type = other DNA
tggtatatagtttaaacaaaacgaatga

SEQ ID NO: 55492 - DNA, 30 bp, synthetic construct; identical to SEQ ID NO: 24388
  misc_feature 1..30: note = Probe
  source 1..30: mol_type = other DNA

SEQ ID NO: 55493 - DNA, 37 bp, synthetic construct; identical to SEQ ID NO: 1772
  misc_feature 1..37: note = Probe
  source 1..37: mol_type = other DNA

SEQ ID NO: 55494 - DNA, 38 bp, synthetic construct; identical to SEQ ID NO: 8175
  misc_feature 1..38: note = Probe
  source 1..38: mol_type = other DNA

SEQ ID NO: 55495 - DNA, 50 bp, synthetic construct; identical to SEQ ID NO: 1773
  misc_feature 1..50: note = Probe
  source 1..50: mol_type = other DNA

SEQ ID NO: 55496 - DNA, 30 bp, synthetic construct
  misc_feature 1..30: note = Probe
  source 1..30: mol_type = other DNA
tggtatcatgcaagattcccattcttgcga

SEQ ID NO: 55497 - DNA, 34 bp, synthetic construct
  misc_feature 1..34: note = Probe
  source 1..34: mol_type = other DNA
tggtatcatgcaagattcccattcttgcgacccg

SEQ ID NO: 55498 - DNA, 39 bp, synthetic construct
  misc_feature 1..39: note = Probe
  source 1..39: mol_type = other DNA
tggtatcatgcaagattcccattcttgcgacccgggttc

SEQ ID NO: 55499 - DNA, 32 bp, synthetic construct; identical to SEQ ID NO: 8180
  misc_feature 1..32: note = Probe
  source 1..32: mol_type = other DNA

SEQ ID NO: 55500 - DNA, 21 bp, synthetic construct
  misc_feature 1..21: note = Probe
  source 1..21: mol_type = other DNA
tggtctagcggttaggattcc

SEQ ID NO: 55501 - DNA, 23 bp, synthetic construct
  misc_feature 1..23: note = Probe
  source 1..23: mol_type = other DNA
tggtctagcggttaggattcctg

SEQ ID NO: 55502 - DNA, 32 bp, synthetic construct
  misc_feature 1..32: note = Probe
  source 1..32: mol_type = other DNA
tggtctagcggttaggattcctggttttcacc

SEQ ID NO: 55503 - DNA, 33 bp, synthetic construct
  misc_feature 1..33: note = Probe
  source 1..33: mol_type = other DNA
tggtctagcggttaggattcctggttttcaccc

SEQ ID NO: 55504 - DNA, 42 bp, synthetic construct
  misc_feature 1..42: note = Probe
  source 1..42: mol_type = other DNA
tggtctagcggttaggattcctggttttcacccaggcggccc

SEQ ID NO: 55505 - DNA, 23 bp, synthetic construct
  misc_feature 1..23: note = Probe
  source 1..23: mol_type = other DNA
tggtctaggggtatgattctcgc

SEQ ID NO: 55506 - DNA, 24 bp, synthetic construct
  misc_feature 1..24: note = Probe
  source 1..24: mol_type = other DNA
tggtctaggggtatgattctcgct

SEQ ID NO: 55507 - DNA, 25 bp, synthetic construct
  misc_feature 1..25: note = Probe
  source 1..25: mol_type = other DNA
tggtctagtggttaggattcggcgc

SEQ ID NO: 55508 - DNA, 26 bp, synthetic construct
  misc_feature 1..26: note = Probe
  source 1..26: mol_type = other DNA
tggtctagtggttaggattcggcgct

SEQ ID NO: 55509 - DNA, 28 bp, synthetic construct
  misc_feature 1..28: note = Probe
  source 1..28: mol_type = other DNA
tggtctagtggttaggattcggcgctct

SEQ ID NO: 55510 - DNA, 30 bp, synthetic construct; identical to SEQ ID NO: 14406
  misc_feature 1..30: note = Probe
  source 1..30: mol_type = other DNA

SEQ ID NO: 55511 - DNA, 32 bp, synthetic construct
  misc_feature 1..32: note = Probe
  source 1..32: mol_type = other DNA
tggtctagtggttaggattcggcgctctcacc

SEQ ID NO: 55512 - DNA, 35 bp, synthetic construct
  misc_feature 1..35: note = Probe
  source 1..35: mol_type = other DNA
tggtctagtggttaggattcggcgctctcaccgcc

SEQ ID NO: 55513 - DNA, 34 bp, synthetic construct; identical to SEQ ID NO: 14407
  misc_feature 1..34: note = Probe
  source 1..34: mol_type = other DNA

SEQ ID NO: 55514 - DNA, 16 bp, synthetic construct
  misc_feature 1..16: note = Probe
  source 1..16: mol_type = other DNA
tggtgagtatccccgc

SEQ ID NO: 55515 - DNA, 20 bp, synthetic construct
  misc_feature 1..20: note = Probe
  source 1..20: mol_type = other DNA
tggtgagtatccccgcctgt

SEQ ID NO: 55516 - DNA, 22 bp, synthetic construct
  misc_feature 1..22: note = Probe
  source 1..22: mol_type = other DNA
tggtgagtatccccgcctgtca

SEQ ID NO: 55517 - DNA, 25 bp, synthetic construct
  misc_feature 1..25: note = Probe
  source 1..25: mol_type = other DNA
tggtgagtatccccgcctgtcacgc

SEQ ID NO: 55518 - DNA, 33 bp, synthetic construct; identical to SEQ ID NO: 24417
  misc_feature 1..33: note = Probe
  source 1..33: mol_type = other DNA

SEQ ID NO: 55519 - DNA, 34 bp, synthetic construct; identical to SEQ ID NO: 14414
  misc_feature 1..34: note = Probe
  source 1..34: mol_type = other DNA

SEQ ID NO: 55520 - DNA, 38 bp, synthetic construct; identical to SEQ ID NO: 14416
  misc_feature 1..38: note = Probe
  source 1..38: mol_type = other DNA

SEQ ID NO: 55521 - DNA, 28 bp, synthetic construct
  misc_feature 1..28: note = Probe
  source 1..28: mol_type = other DNA
tggtgctaataacgccaaggtcgcgggt

SEQ ID NO: 55522 - DNA, 29 bp, synthetic construct
  misc_feature 1..29: note = Probe
  source 1..29: mol_type = other DNA
tggtggttcagtggtagaattctcgcctg

SEQ ID NO: 55523 - DNA, 31 bp, synthetic construct; identical to SEQ ID NO: 8197
  misc_feature 1..31: note = Probe
  source 1..31: mol_type = other DNA

SEQ ID NO: 55524 - DNA, 26 bp, synthetic construct
  misc_feature 1..26: note = Probe
  source 1..26: mol_type = other DNA
tggtgtagtggtatcatgcaagattc

SEQ ID NO: 55525 - DNA, 27 bp, synthetic construct
  misc_feature 1..27: note = Probe
  source 1..27: mol_type = other DNA
tggtgtagtggtatcatgcaagattcc

SEQ ID NO: 55526 - DNA, 32 bp, synthetic construct
  misc_feature 1..32: note = Probe
  source 1..32: mol_type = other DNA
tggtgtagtggtatcatgcaagattcccattc

SEQ ID NO: 55527 - DNA, 42 bp, synthetic construct
  misc_feature 1..42: note = Probe
  source 1..42: mol_type = other DNA
tggtgtagtggtatcatgcaagattcccattcttgcgacccg

SEQ ID NO: 55528 - DNA, 27 bp, synthetic construct
  misc_feature 1..27: note = Probe
  source 1..27: mol_type = other DNA
tggttagcactctggactctgaatcca

SEQ ID NO: 55529 - DNA, 34 bp, synthetic construct; identical to SEQ ID NO: 24440
  misc_feature 1..34: note = Probe
  source 1..34: mol_type = other DNA

SEQ ID NO: 55530 - DNA, 34 bp, synthetic construct; identical to SEQ ID NO: 14427
  misc_feature 1..34: note = Probe
  source 1..34: mol_type = other DNA

SEQ ID NO: 55531 - DNA, 21 bp, synthetic construct
  misc_feature 1..21: note = Probe
  source 1..21: mol_type = other DNA
tggttaggattcggcgctctc

SEQ ID NO: 55532 - DNA, 25 bp, synthetic construct
  misc_feature 1..25: note = Probe
  source 1..25: mol_type = other DNA
tggttaggattcggcgctctcaccg

SEQ ID NO: 55533 - DNA, 30 bp, synthetic construct; identical to SEQ ID NO: 24444
  misc_feature 1..30: note = Probe
  source 1..30: mol_type = other DNA

SEQ ID NO: 55534 - DNA, 31 bp, synthetic construct; identical to SEQ ID NO: 24445
  misc_feature 1..31: note = Probe
  source 1..31: mol_type = other DNA

SEQ ID NO: 55535 - DNA, 38 bp, synthetic construct; identical to SEQ ID NO: 24448
  misc_feature 1..38: note = Probe
  source 1..38: mol_type = other DNA

SEQ ID NO: 55536 - DNA, 16 bp, synthetic construct
  misc_feature 1..16: note = Probe
  source 1..16: mol_type = other DNA
tggttagtactctgcg

SEQ ID NO: 55537 - DNA, 18 bp, synthetic construct
  misc_feature 1..18: note = Probe
  source 1..18: mol_type = other DNA
tggttagtactctgcgtt

SEQ ID NO: 55538 - DNA, 16 bp, synthetic construct
  misc_feature 1..16: note = Probe
  source 1..16: mol_type = other DNA
tggttcagtggtagaa

SEQ ID NO: 55539 - DNA, 23 bp, synthetic construct
  misc_feature 1..23: note = Probe
  source 1..23: mol_type = other DNA
tggttcagtggtagaattctcgc

SEQ ID NO: 55540 - DNA, 24 bp, synthetic construct
  misc_feature 1..24: note = Probe
  source 1..24: mol_type = other DNA
tggttcagtggtagaattctcgcc

SEQ ID NO: 55541 - DNA, 25 bp, synthetic construct
  misc_feature 1..25: note = Probe
  source 1..25: mol_type = other DNA
tggttcagtggtagaattctcgcct

SEQ ID NO: 55542 - DNA, 26 bp, synthetic construct
  misc_feature 1..26: note = Probe
  source 1..26: mol_type = other DNA
tggttcagtggtagaattctcgcctg

SEQ ID NO: 55543 - DNA, 27 bp, synthetic construct
  misc_feature 1..27: note = Probe
  source 1..27: mol_type = other DNA
tggttcagtggtagaattctcgcctgc

SEQ ID NO: 55544 - DNA, 28 bp, synthetic construct
  misc_feature 1..28: note = Probe
  source 1..28: mol_type = other DNA
tggttcagtggtagaattctcgcctgcc

SEQ ID NO: 55545 - DNA, 31 bp, synthetic construct; identical to SEQ ID NO: 35269
  misc_feature 1..31: note = Probe
  source 1..31: mol_type = other DNA

SEQ ID NO: 55546 - DNA, 32 bp, synthetic construct; identical to SEQ ID NO: 24464
  misc_feature 1..32: note = Probe
  source 1..32: mol_type = other DNA

SEQ ID NO: 55547 - DNA, 33 bp, synthetic construct; identical to SEQ ID NO: 24465
  misc_feature 1..33: note = Probe
  source 1..33: mol_type = other DNA

SEQ ID NO: 55548 - DNA, 41 bp, synthetic construct; identical to SEQ ID NO: 8211
  misc_feature 1..41: note = Probe
  source 1..41: mol_type = other DNA

SEQ ID NO: 55549 - DNA, 45 bp, synthetic construct; identical to SEQ ID NO: 35271
  misc_feature 1..45: note = Probe
  source 1..45: mol_type = other DNA

SEQ ID NO: 55550 - DNA, 50 bp, synthetic construct; identical to SEQ ID NO: 8215
  misc_feature 1..50: note = Probe
  source 1..50: mol_type = other DNA

SEQ ID NO: 55551 - DNA, 23 bp, synthetic construct
  misc_feature 1..23: note = Probe
  source 1..23: mol_type = other DNA
tggttcgaatccggctcgaagga

SEQ ID NO: 55552 - DNA, 25 bp, synthetic construct
  misc_feature 1..25: note = Probe
  source 1..25: mol_type = other DNA
tggttcgaatccggctcgaaggacg

SEQ ID NO: 55553 - DNA, 23 bp, synthetic construct
  misc_feature 1..23: note = Probe
  source 1..23: mol_type = other DNA
tggttcgattccggctcgaagga

SEQ ID NO: 55554 - DNA, 25 bp, synthetic construct
  misc_feature 1..25: note = Probe
  source 1..25: mol_type = other DNA
tggttcgattccggctcgaaggact

SEQ ID NO: 55555 - DNA, 26 bp, synthetic construct
  misc_feature 1..26: note = Probe
  source 1..26: mol_type = other DNA
tggttgtagtccgtgcgagaataatg

SEQ ID NO: 55556 - DNA, 21 bp, synthetic construct
  misc_feature 1..21: note = Probe
  source 1..21: mol_type = other DNA
tgtaaacaggagatcctgggt

SEQ ID NO: 55557 - DNA, 22 bp, synthetic construct
  misc_feature 1..22: note = Probe
  source 1..22: mol_type = other DNA
tgtaaacaggagatcctgggtt

SEQ ID NO: 55558 - DNA, 38 bp, synthetic construct; identical to SEQ ID NO: 8222
  misc_feature 1..38: note = Probe
  source 1..38: mol_type = other DNA

SEQ ID NO: 55559 - DNA, 39 bp, synthetic construct
  misc_feature 1..39: note = Probe
  source 1..39: mol_type = other DNA
tgtaaaccggagatgaaaacctttttccaaggacaaatc

SEQ ID NO: 55560 - DNA, 29 bp, synthetic construct
  misc_feature 1..29: note = Probe
  source 1..29: mol_type = other DNA
tgtaaatatagtttaaccaaaacatcaga

SEQ ID NO: 55561 - DNA, 43 bp, synthetic construct; identical to SEQ ID NO: 8233
  misc_feature 1..43: note = Probe
  source 1..43: mol_type = other DNA

SEQ ID NO: 55562 - DNA, 44 bp, synthetic construct; identical to SEQ ID NO: 8234
  misc_feature 1..44: note = Probe
  source 1..44: mol_type = other DNA

SEQ ID NO: 55563 - DNA, 45 bp, synthetic construct; identical to SEQ ID NO: 8235
  misc_feature 1..45: note = Probe
  source 1..45: mol_type = other DNA

SEQ ID NO: 55564 - DNA, 46 bp, synthetic construct; identical to SEQ ID NO: 8236
  misc_feature 1..46: note = Probe
  source 1..46: mol_type = other DNA

SEQ ID NO: 55565 - DNA, 50 bp, synthetic construct; identical to SEQ ID NO: 8238
  misc_feature 1..50: note = Probe
  source 1..50: mol_type = other DNA

SEQ ID NO: 55566 - DNA, 21 bp, synthetic construct
  misc_feature 1..21: note = Probe
  source 1..21: mol_type = other DNA
tgtaatggttagcactctgga

SEQ ID NO: 55567 - DNA, 23 bp, synthetic construct
  misc_feature 1..23: note = Probe
  source 1..23: mol_type = other DNA
tgtagcggttatcacattcgcct

SEQ ID NO: 55568 - DNA, 24 bp, synthetic construct
  misc_feature 1..24: note = Probe
  source 1..24: mol_type = other DNA
tgtagcggttatcacattcgcctc

SEQ ID NO: 55569 - DNA, 25 bp, synthetic construct
  misc_feature 1..25: note = Probe
  source 1..25: mol_type = other DNA
tgtagcggttatcacattcgcctca

SEQ ID NO: 55570 - DNA, 27 bp, synthetic construct
  misc_feature 1..27: note = Probe
  source 1..27: mol_type = other DNA
tgtagcggttatcacattcgcctcaca

SEQ ID NO: 55571 - DNA, 29 bp, synthetic construct
  misc_feature 1..29: note = Probe
  source 1..29: mol_type = other DNA
tgtagcggttatcacattcgcctcacacg

SEQ ID NO: 55572 - DNA, 22 bp, synthetic construct
  misc_feature 1..22: note = Probe
  source 1..22: mol_type = other DNA
tgtagtccgtgcgagaataatg

SEQ ID NO: 55573 - DNA, 38 bp, synthetic construct
  misc_feature 1..38: note = Probe
  source 1..38: mol_type = other DNA
tgtagtggtatcatgcaagattcccattcttgcgaccc

SEQ ID NO: 55574 - DNA, 23 bp, synthetic construct
  misc_feature 1..23: note = Probe
  source 1..23: mol_type = other DNA
tgtagtggtcatcacgttcgcct

SEQ ID NO: 55575 - DNA, 23 bp, synthetic construct
  misc_feature 1..23: note = Probe
  source 1..23: mol_type = other DNA
tgtagtggttatcacgttcgcct

SEQ ID NO: 55576 - DNA, 25 bp, synthetic construct
  misc_feature 1..25: note = Probe
  source 1..25: mol_type = other DNA
tgtagtggttatcacgttcgcctca

SEQ ID NO: 55577 - DNA, 39 bp, synthetic construct; identical to SEQ ID NO: 24490
  misc_feature 1..39: note = Probe
  source 1..39: mol_type = other DNA

SEQ ID NO: 55578 - DNA, 22 bp, synthetic construct
  misc_feature 1..22: note = Probe
  source 1..22: mol_type = other DNA
tgtcacgcgggagaccggggtt

SEQ ID NO: 55579 - DNA, 23 bp, synthetic construct
  misc_feature 1..23: note = Probe
  source 1..23: mol_type = other DNA
tgtcacgcgggagaccggggttc

SEQ ID NO: 55580 - DNA, 43 bp, synthetic construct; identical to SEQ ID NO: 8254
  misc_feature 1..43: note = Probe
  source 1..43: mol_type = other DNA

SEQ ID NO: 55581 - DNA, 43 bp, synthetic construct; identical to SEQ ID NO: 8257
  misc_feature 1..43: note = Probe
  source 1..43: mol_type = other DNA

SEQ ID NO: 55582 - DNA, 43 bp, synthetic construct; identical to SEQ ID NO: 8271
  misc_feature 1..43: note = Probe
  source 1..43: mol_type = other DNA

SEQ ID NO: 55583 - DNA, 21 bp, synthetic construct
  misc_feature 1..21: note = Probe
  source 1..21: mol_type = other DNA
tgtgctccggagttacctcgt

SEQ ID NO: 55584 - DNA, 22 bp, synthetic construct
  misc_feature 1..22: note = Probe
  source 1..22: mol_type = other DNA
tgtgctccggagttacctcgtt

SEQ ID NO: 55585 - DNA, 23 bp, synthetic construct
  misc_feature 1..23: note = Probe
  source 1..23: mol_type = other DNA
tgtgctccggagttacctcgttt

SEQ ID NO: 55586 - DNA, 24 bp, synthetic construct
  misc_feature 1..24: note = Probe
  source 1..24: mol_type = other DNA
tgtgctccggagttacctcgtttt

SEQ ID NO: 55587 - DNA, 39 bp, synthetic construct; identical to SEQ ID NO: 51038
  misc_feature 1..39: note = Probe
  source 1..39: mol_type = other DNA

SEQ ID NO: 55588 - DNA, 44 bp, synthetic construct; identical to SEQ ID NO: 8278
  misc_feature 1..44: note = Probe
  source 1..44: mol_type = other DNA

SEQ ID NO: 55589 - DNA, 26 bp, synthetic construct
  misc_feature 1..26: note = Probe
  source 1..26: mol_type = other DNA
tgtttgtgggtttaagtcccattggt

SEQ ID NO: 55590 - DNA, 36 bp, synthetic construct; identical to SEQ ID NO: 24564
  misc_feature 1..36: note = Probe
  source 1..36: mol_type = other DNA

SEQ ID NO: 55591 - DNA, 39 bp, synthetic construct; identical to SEQ ID NO: 8298
  misc_feature 1..39: note = Probe
  source 1..39: mol_type = other DNA

SEQ ID NO: 55592 - DNA, 31 bp, synthetic construct; identical to SEQ ID NO: 8301
  misc_feature 1..31: note = Probe
  source 1..31: mol_type = other DNA

SEQ ID NO: 55593 - DNA, 32 bp, synthetic construct; identical to SEQ ID NO: 8302
  misc_feature 1..32: note = Probe
  source 1..32: mol_type = other DNA

SEQ ID NO: 55594 - DNA, 33 bp, synthetic construct; identical to SEQ ID NO: 8303
  misc_feature 1..33: note = Probe
  source 1..33: mol_type = other DNA

SEQ ID NO: 55595 - DNA, 34 bp, synthetic construct; identical to SEQ ID NO: 8304
  misc_feature 1..34: note = Probe
  source 1..34: mol_type = other DNA

SEQ ID NO: 55596 - DNA, 35 bp, synthetic construct; identical to SEQ ID NO: 24571
  misc_feature 1..35: note = Probe
  source 1..35: mol_type = other DNA

SEQ ID NO: 55597 - DNA, 40 bp, synthetic construct; identical to SEQ ID NO: 8305
  misc_feature 1..40: note = Probe
  source 1..40: mol_type = other DNA

SEQ ID NO: 55598 - DNA, 49 bp, synthetic construct; identical to SEQ ID NO: 1784
  misc_feature 1..49: note = Probe
  source 1..49: mol_type = other DNA

SEQ ID NO: 55599 - DNA, 50 bp, synthetic construct; identical to SEQ ID NO: 1785
  misc_feature 1..50: note = Probe
  source 1..50: mol_type = other DNA

SEQ ID NO: 55600 - DNA, 35 bp, synthetic construct; identical to SEQ ID NO: 51068
  misc_feature 1..35: note = Probe
  source 1..35: mol_type = other DNA

SEQ ID NO: 55601 - DNA, 36 bp, synthetic construct; identical to SEQ ID NO: 25864
  misc_feature 1..36: note = Probe
  source 1..36: mol_type = other DNA

SEQ ID NO: 55602 - DNA, 38 bp, synthetic construct; identical to SEQ ID NO: 51070
  misc_feature 1..38: note = Probe
  source 1..38: mol_type = other DNA

SEQ ID NO: 55603 - DNA, 39 bp, synthetic construct; identical to SEQ ID NO: 51071
  misc_feature 1..39: note = Probe
  source 1..39: mol_type = other DNA

SEQ ID NO: 55604 - DNA, 40 bp, synthetic construct; identical to SEQ ID NO: 8307
  misc_feature 1..40: note = Probe
  source 1..40: mol_type = other DNA

SEQ ID NO: 55605 - DNA, 41 bp, synthetic construct; identical to SEQ ID NO: 1787
  misc_feature 1..41: note = Probe
  source 1..41: mol_type = other DNA

SEQ ID NO: 55606 - DNA, 42 bp, synthetic construct; identical to SEQ ID NO: 35397
  misc_feature 1..42: note = Probe
  source 1..42: mol_type = other DNA

SEQ ID NO: 55607 - DNA, 50 bp, synthetic construct; identical to SEQ ID NO: 51075
  misc_feature 1..50: note = Probe
  source 1..50: mol_type = other DNA

SEQ ID NO: 55608 - DNA, 41 bp, synthetic construct; identical to SEQ ID NO: 8308
  misc_feature 1..41: note = Probe
  source 1..41: mol_type = other DNA

SEQ ID NO: 55609 - DNA, 41 bp, synthetic construct; identical to SEQ ID NO: 8309
  misc_feature 1..41: note = Probe
  source 1..41: mol_type = other DNA

SEQ ID NO: 55610 - DNA, 40 bp, synthetic construct; identical to SEQ ID NO: 51078
  misc_feature 1..40: note = Probe
  source 1..40: mol_type = other DNA

SEQ ID NO: 55611 - DNA, 50 bp, synthetic construct
  misc_feature 1..50: note = Probe
  source 1..50: mol_type = other DNA
ttaaccgaaaggttggtggttcgagcccacccagggacggctgaaatttt

SEQ ID NO: 55612 - DNA, 37 bp, synthetic construct; identical to SEQ ID NO: 51080
  misc_feature 1..37: note = Probe
  source 1..37: mol_type = other DNA

SEQ ID NO: 55613 - DNA, 49 bp, synthetic construct; identical to SEQ ID NO: 8310
  misc_feature 1..49: note = Probe
  source 1..49: mol_type = other DNA

SEQ ID NO: 55614 - DNA, 50 bp, synthetic construct; identical to SEQ ID NO: 8311
  misc_feature 1..50: note = Probe
  source 1..50: mol_type = other DNA

SEQ ID NO: 55615 - DNA, 33 bp, synthetic construct; identical to SEQ ID NO: 1788
  misc_feature 1..33: note = Probe
  source 1..33: mol_type = other DNA

SEQ ID NO: 55616 - DNA, 37 bp, synthetic construct; identical to SEQ ID NO: 1790
  misc_feature 1..37: note = Probe
  source 1..37: mol_type = other DNA

SEQ ID NO: 55617 - DNA, 38 bp, synthetic construct; identical to SEQ ID NO: 1791
  misc_feature 1..38: note = Probe
  source 1..38: mol_type = other DNA

SEQ ID NO: 55618 - DNA, 42 bp, synthetic construct; identical to SEQ ID NO: 8319
  misc_feature 1..42: note = Probe
  source 1..42: mol_type = other DNA

SEQ ID NO: 55619 - DNA, 21 bp, synthetic construct
  misc_feature 1..21: note = Probe
  source 1..21: mol_type = other DNA
ttaacttgaccgctctgagct

SEQ ID NO: 55620 - DNA, 32 bp, synthetic construct; identical to SEQ ID NO: 8326
  misc_feature 1..32: note = Probe
  source 1..32: mol_type = other DNA

SEQ ID NO: 55621 - DNA, 44 bp, synthetic construct; identical to SEQ ID NO: 8328
  misc_feature 1..44: note = Probe
  source 1..44: mol_type = other DNA

SEQ ID NO: 55622 - DNA, 33 bp, synthetic construct; identical to SEQ ID NO: 8333
  misc_feature 1..33: note = Probe
  source 1..33: mol_type = other DNA

SEQ ID NO: 55623 - DNA, 42 bp, synthetic construct; identical to SEQ ID NO: 8339
  misc_feature 1..42: note = Probe
  source 1..42: mol_type = other DNA

SEQ ID NO: 55624 - DNA, 27 bp, synthetic construct
  misc_feature 1..27: note = Probe
  source 1..27: mol_type = other DNA
ttacagtcagaggttcaattcctcttc

SEQ ID NO: 55625 - DNA, 28 bp, synthetic construct
  misc_feature 1..28: note = Probe
  source 1..28: mol_type = other DNA
ttacagtcagaggttcaattcctcttct

SEQ ID NO: 55626 - DNA, 29 bp, synthetic construct
  misc_feature 1..29: note = Probe
  source 1..29: mol_type = other DNA
ttacagtcagaggttcaattcctcttctt

SEQ ID NO: 55627 - DNA, 36 bp, synthetic construct; identical to SEQ ID NO: 24604
  misc_feature 1..36: note = Probe
  source 1..36: mol_type = other DNA

SEQ ID NO: 55628 - DNA, 32 bp, synthetic construct; identical to SEQ ID NO: 8359
  misc_feature 1..32: note = Probe
  source 1..32: mol_type = other DNA

SEQ ID NO: 55629 - DNA, 32 bp, synthetic construct
  misc_feature 1..32: note = Probe
  source 1..32: mol_type = other DNA
ttagcatagctgccttccaagcagttgacccg

SEQ ID NO: 55630 - DNA, 50 bp, synthetic construct; identical to SEQ ID NO: 1795
  misc_feature 1..50: note = Probe
  source 1..50: mol_type = other DNA

SEQ ID NO: 55631 - DNA, 50 bp, synthetic construct; identical to SEQ ID NO: 8365
  misc_feature 1..50: note = Probe
  source 1..50: mol_type = other DNA

SEQ ID NO: 55632 - DNA, 36 bp, synthetic construct; identical to SEQ ID NO: 8373
  misc_feature 1..36: note = Probe
  source 1..36: mol_type = other DNA

SEQ ID NO: 55633 - DNA, 19 bp, synthetic construct
  misc_feature 1..19: note = Probe
  source 1..19: mol_type = other DNA
ttagggtgcgagaggtccc

SEQ ID NO: 55634 - DNA, 23 bp, synthetic construct
  misc_feature 1..23: note = Probe
  source 1..23: mol_type = other DNA
ttagggtgcgagaggtcccgggt

SEQ ID NO: 55635 - DNA, 24 bp, synthetic construct
  misc_feature 1..24: note = Probe
  source 1..24: mol_type = other DNA
ttagggtgcgagaggtcccgggtt

SEQ ID NO: 55636 - DNA, 23 bp, synthetic construct
  misc_feature 1..23: note = Probe
  source 1..23: mol_type = other DNA
ttcaaatcccggacgagccccct

SEQ ID NO: 55637 - DNA, 27 bp, synthetic construct
  misc_feature 1..27: note = Probe
  source 1..27: mol_type = other DNA
ttcaacttaacttgaccgctctgagct

SEQ ID NO: 55638 - DNA, 38 bp, synthetic construct; identical to SEQ ID NO: 8398
  misc_feature 1..38: note = Probe
  source 1..38: mol_type = other DNA

SEQ ID NO: 55639 - DNA, 42 bp, synthetic construct; identical to SEQ ID NO: 8402
  misc_feature 1..42: note = Probe
  source 1..42: mol_type = other DNA

SEQ ID NO: 55640 - DNA, 49 bp, synthetic construct; identical to SEQ ID NO: 8404
  misc_feature 1..49: note = Probe
  source 1..49: mol_type = other DNA

SEQ ID NO: 55641 - DNA, 42 bp, synthetic construct; identical to SEQ ID NO: 8407
  misc_feature 1..42: note = Probe
  source 1..42: mol_type = other DNA

SEQ ID NO: 55642 - DNA, 29 bp, synthetic construct
  misc_feature 1..29: note = Probe
  source 1..29: mol_type = other DNA
ttccatagtgtagtggttatcacgtctgc

SEQ ID NO: 55643 - DNA, 19 bp, synthetic construct
  misc_feature 1..19: note = Probe
  source 1..19: mol_type = other DNA
ttcccattcttgcgacccg

SEQ ID NO: 55644 - DNA, 23 bp, synthetic construct
  misc_feature 1..23: note = Probe
  source 1..23: mol_type = other DNA
ttcccattcttgcgacccgggtt

SEQ ID NO: 55645 - DNA, 24 bp, synthetic construct
  misc_feature 1..24: note = Probe
  source 1..24: mol_type = other DNA
ttcccattcttgcgacccgggttc

SEQ ID NO: 55646 - DNA, 27 bp, synthetic construct
  misc_feature 1..27: note = Probe
  source 1..27: mol_type = other DNA
ttcccattcttgcgacccgggttcgat

SEQ ID NO: 55647 - DNA, 28 bp, synthetic construct
  misc_feature 1..28: note = Probe
  source 1..28: mol_type = other DNA
ttcccattcttgcgacccgggttcgatt

SEQ ID NO: 55648 - DNA, 29 bp, synthetic construct
  misc_feature 1..29: note = Probe
  source 1..29: mol_type = other DNA
ttcccattcttgcgacccgggttcgattc

SEQ ID NO: 55649 - DNA, 39 bp, synthetic construct; identical to SEQ ID NO: 42226
  misc_feature 1..39: note = Probe
  source 1..39: mol_type = other DNA

SEQ ID NO: 55650 - DNA, 43 bp, synthetic construct
  misc_feature 1..43: note = Probe
  source 1..43: mol_type = other DNA
ttcccattcttgcgacccgggttcgattcccgggcggcgcact

SEQ ID NO: 55651 - DNA, 44 bp, synthetic construct; identical to SEQ ID NO: 8412
  misc_feature 1..44: note = Probe
  source 1..44: mol_type = other DNA

SEQ ID NO: 55652 - DNA, 49 bp, synthetic construct
  misc_feature 1..49: note = Probe
  source 1..49: mol_type = other DNA
ttcccattcttgcgacccgggttcgattcccgggcggcgcacttagttt

SEQ ID NO: 55653 - DNA, 50 bp, synthetic construct; identical to SEQ ID NO: 42227
  misc_feature 1..50: note = Probe
  source 1..50: mol_type = other DNA

SEQ ID NO: 55654 - DNA, 22 bp, synthetic construct
  misc_feature 1..22: note = Probe
  source 1..22: mol_type = other DNA
ttccccgcacaggttcgaatcc

SEQ ID NO: 55655 - DNA, 16 bp, synthetic construct
  misc_feature 1..16: note = Probe
  source 1..16: mol_type = other DNA
ttcccgggcggcgcac

SEQ ID NO: 55656 - DNA, 17 bp, synthetic construct
  misc_feature 1..17: note = Probe
  source 1..17: mol_type = other DNA
ttcccgggcggcgcact

SEQ ID NO: 55657 - DNA, 18 bp, synthetic construct
  misc_feature 1..18: note = Probe
  source 1..18: mol_type = other DNA
ttcccgggcggcgcactt

SEQ ID NO: 55658 - DNA, 19 bp, synthetic construct
  misc_feature 1..19: note = Probe
  source 1..19: mol_type = other DNA
ttcccgggcggcgcactta

SEQ ID NO: 55659 - DNA, 20 bp, synthetic construct
  misc_feature 1..20: note = Probe
  source 1..20: mol_type = other DNA
ttcccgggcggcgcacttag

SEQ ID NO: 55660 - DNA, 16 bp, synthetic construct
  misc_feature 1..16: note = Probe
  source 1..16: mol_type = other DNA
ttcccggtcagggaac

SEQ ID NO: 55661 - DNA, 17 bp, synthetic construct
  misc_feature 1..17: note = Probe
  source 1..17: mol_type = other DNA
ttcccggtcagggaacc

SEQ ID NO: 55662 - DNA, 18 bp, synthetic construct
  misc_feature 1..18: note = Probe
  source 1..18: mol_type = other DNA
ttcccggtcagggaacca

SEQ ID NO: 55663 - DNA, 19 bp, synthetic construct
  misc_feature 1..19: note = Probe
  source 1..19: mol_type = other DNA
ttcccggtcagggaaccaa

SEQ ID NO: 55664 - DNA, 23 bp, synthetic construct
  misc_feature 1..23: note = Probe
  source 1..23: mol_type = other DNA
ttccggatcagaagattgagggt

SEQ ID NO: 55665 - DNA, 19 bp, synthetic construct
  misc_feature 1..19: note = Probe
  source 1..19: mol_type = other DNA
ttccggctcgaaggacttc

SEQ ID NO: 55666 - DNA, 20 bp, synthetic construct
  misc_feature 1..20: note = Probe
  source 1..20: mol_type = other DNA
ttccggctcgaaggacttcg

SEQ ID NO: 55667 - DNA, 26 bp, synthetic construct
  misc_feature 1..26: note = Probe
  source 1..26: mol_type = other DNA
ttccgtagtgtagcggttatcacatt

SEQ ID NO: 55668 - DNA, 29 bp, synthetic construct
  misc_feature 1..29: note = Probe
  source 1..29: mol_type = other DNA
ttccgtagtgtagtggtcatcacgttcgc

SEQ ID NO: 55669 - DNA, 26 bp, synthetic construct
  misc_feature 1..26: note = Probe
  source 1..26: mol_type = other DNA
ttccgtagtgtagtggttatcacgtt

SEQ ID NO: 55670 - DNA, 29 bp, synthetic construct
  misc_feature 1..29: note = Probe
  source 1..29: mol_type = other DNA
ttccgtagtgtagtggttatcacgttcgc

SEQ ID NO: 55671 - DNA, 30 bp, synthetic construct; identical to SEQ ID NO: 8425
  misc_feature 1..30: note = Probe
  source 1..30: mol_type = other DNA

SEQ ID NO: 55672 - DNA, 35 bp, synthetic construct; identical to SEQ ID NO: 8437
  misc_feature 1..35: note = Probe
  source 1..35: mol_type = other DNA

SEQ ID NO: 55673 - DNA, 36 bp, synthetic construct; identical to SEQ ID NO: 8438
  misc_feature 1..36: note = Probe
  source 1..36: mol_type = other DNA

SEQ ID NO: 55674 - DNA, 39 bp, synthetic construct; identical to SEQ ID NO: 8444
  misc_feature 1..39: note = Probe
  source 1..39: mol_type = other DNA

SEQ ID NO: 55675 - DNA, 22 bp, synthetic construct
  misc_feature 1..22: note = Probe
  source 1..22: mol_type = other DNA
ttcgagtctcggtggaaccttt

SEQ ID NO: 55676 - DNA, 23 bp, synthetic construct
  misc_feature 1..23: note = Probe
  source 1..23: mol_type = other DNA
ttcgatccccggcatctccattg

SEQ ID NO: 55677 - DNA, 19 bp, synthetic construct
  misc_feature 1..19: note = Probe
  source 1..19: mol_type = other DNA
ttcgggtgcgagaggtccc

SEQ ID NO: 55678 - DNA, 23 bp, synthetic construct
  misc_feature 1..23: note = Probe
  source 1..23: mol_type = other DNA
ttcgggtgcgagaggtcccgggt

SEQ ID NO: 55679 - DNA, 24 bp, synthetic construct
  misc_feature 1..24: note = Probe
  source 1..24: mol_type = other DNA
ttcgggtgcgagaggtcccgggtt

SEQ ID NO: 55680 - DNA, 37 bp, synthetic construct; identical to SEQ ID NO: 8466
  misc_feature 1..37: note = Probe
  source 1..37: mol_type = other DNA

SEQ ID NO: 55681 - DNA, 16 bp, synthetic construct
  misc_feature 1..16: note = Probe
  source 1..16: mol_type = other DNA
ttctcgcctgccacgc

SEQ ID NO: 55682 - DNA, 26 bp, synthetic construct
  misc_feature 1..26: note = Probe
  source 1..26: mol_type = other DNA
ttgacaacattcaaaaaagagtaata

SEQ ID NO: 55683 - DNA, 45 bp, synthetic construct; identical to SEQ ID NO: 8473
  misc_feature 1..45: note = Probe
  source 1..45: mol_type = other DNA

SEQ ID NO: 55684 - DNA, 43 bp, synthetic construct; identical to SEQ ID NO: 8477
  misc_feature 1..43: note = Probe
  source 1..43: mol_type = other DNA

SEQ ID NO: 55685 - DNA, 22 bp, synthetic construct
  misc_feature 1..22: note = Probe
  source 1..22: mol_type = other DNA
ttgggtccgagaggtcccgggt

SEQ ID NO: 55686 - DNA, 23 bp, synthetic construct
  misc_feature 1..23: note = Probe
  source 1..23: mol_type = other DNA
ttgggtccgagaggtcccgggtt

SEQ ID NO: 55687 - DNA, 18 bp, synthetic construct
  misc_feature 1..18: note = Probe
  source 1..18: mol_type = other DNA
ttgggtgcgagaggtccc

SEQ ID NO: 55688 - DNA, 22 bp, synthetic construct
  misc_feature 1..22: note = Probe
  source 1..22: mol_type = other DNA
ttgggtgcgagaggtcccgggt

SEQ ID NO: 55689 - DNA, 23 bp, synthetic construct
  misc_feature 1..23: note = Probe
  source 1..23: mol_type = other DNA
ttgggtgcgagaggtcccgggtt

SEQ ID NO: 55690 - DNA, 41 bp, synthetic construct; identical to SEQ ID NO: 8481
  misc_feature 1..41: note = Probe
  source 1..41: mol_type = other DNA

SEQ ID NO: 55691 - DNA, 29 bp, synthetic construct
  misc_feature 1..29: note = Probe
  source 1..29: mol_type = other DNA
ttggtggttcagtggtagaattctcgcct

SEQ ID NO: 55692 - DNA, 32 bp, synthetic construct; identical to SEQ ID NO: 8493
  misc_feature 1..32: note = Probe
  source 1..32: mol_type = other DNA

SEQ ID NO: 55693 - DNA, 22 bp, synthetic construct
  misc_feature 1..22: note = Probe
  source 1..22: mol_type = other DNA
ttgtaaacaggagatcctgggt

SEQ ID NO: 55694 - DNA, 23 bp, synthetic construct
  misc_feature 1..23: note = Probe
  source 1..23: mol_type = other DNA
ttgtaaacaggagatcctgggtt

SEQ ID NO: 55695 - DNA, 34 bp, synthetic construct
  misc_feature 1..34: note = Probe
  source 1..34: mol_type = other DNA
ttgtaaaccggagatgaaaacctttttccaagga

SEQ ID NO: 55696 - DNA, 35 bp, synthetic construct; identical to SEQ ID NO: 1799
  misc_feature 1..35: note = Probe
  source 1..35: mol_type = other DNA

SEQ ID NO: 55697 - DNA, 36 bp, synthetic construct; identical to SEQ ID NO: 1800
  misc_feature 1..36: note = Probe
  source 1..36: mol_type = other DNA

SEQ ID NO: 55698 - DNA, 37 bp, synthetic construct; identical to SEQ ID NO: 8497
  misc_feature 1..37: note = Probe
  source 1..37: mol_type = other DNA

SEQ ID NO: 55699 - DNA, 38 bp, synthetic construct; identical to SEQ ID NO: 8498
  misc_feature 1..38: note = Probe
  source 1..38: mol_type = other DNA

SEQ ID NO: 55700 - DNA, 39 bp, synthetic construct; identical to SEQ ID NO: 8499
  misc_feature 1..39: note = Probe
  source 1..39: mol_type = other DNA

SEQ ID NO: 55701 - DNA, 40 bp, synthetic construct; identical to SEQ ID NO: 8500
  misc_feature 1..40: note = Probe
  source 1..40: mol_type = other DNA

SEQ ID NO: 55702 - DNA, 41 bp, synthetic construct; identical to SEQ ID NO: 8501
  misc_feature 1..41: note = Probe
  source 1..41: mol_type = other DNA

SEQ ID NO: 55703 - DNA, 44 bp, synthetic construct; identical to SEQ ID NO: 8503
  misc_feature 1..44: note = Probe
  source 1..44: mol_type = other DNA

SEQ ID NO: 55704 - DNA, 44 bp, synthetic construct; identical to SEQ ID NO: 8511
  misc_feature 1..44: note = Probe
  source 1..44: mol_type = other DNA

SEQ ID NO: 55705 - DNA, 35 bp, synthetic construct; identical to SEQ ID NO: 8515
  misc_feature 1..35: note = Probe
  source 1..35: mol_type = other DNA

SEQ ID NO: 55706 - DNA, 45 bp, synthetic construct; identical to SEQ ID NO: 8516
  misc_feature 1..45: note = Probe
  source 1..45: mol_type = other DNA

SEQ ID NO: 55707 - DNA, 50 bp, synthetic construct; identical to SEQ ID NO: 8517
  misc_feature 1..50: note = Probe
  source 1..50: mol_type = other DNA

SEQ ID NO: 55708 - DNA, 27 bp, synthetic construct
  misc_feature 1..27: note = Probe
  source 1..27: mol_type = other DNA
tttacagtcagaggttcaattcctctt

SEQ ID NO: 55709 - DNA, 28 bp, synthetic construct
  misc_feature 1..28: note = Probe
  source 1..28: mol_type = other DNA
tttacagtcagaggttcaattcctcttc

SEQ ID NO: 55710 - DNA, 29 bp, synthetic construct
  misc_feature 1..29: note = Probe
  source 1..29: mol_type = other DNA
tttacagtcagaggttcaattcctcttct

SEQ ID NO: 55711 - DNA, 30 bp, synthetic construct; identical to SEQ ID NO: 24800
  misc_feature 1..30: note = Probe
  source 1..30: mol_type = other DNA

SEQ ID NO: 55712 - DNA, 31 bp, synthetic construct; identical to SEQ ID NO: 24801
  misc_feature 1..31: note = Probe
  source 1..31: mol_type = other DNA

SEQ ID NO: 55713 - DNA, 33 bp, synthetic construct; identical to SEQ ID NO: 8521
  misc_feature 1..33: note = Probe
  source 1..33: mol_type = other DNA

SEQ ID NO: 55714 - DNA, 34 bp, synthetic construct; identical to SEQ ID NO: 24803
  misc_feature 1..34: note = Probe
  source 1..34: mol_type = other DNA

SEQ ID NO: 55715 - DNA, 36 bp, synthetic construct
  misc_feature 1..36: note = Probe
  source 1..36: mol_type = other DNA
tttacagtcagaggttcaattcctcttcttaacaac

SEQ ID NO: 55716 - DNA, 37 bp, synthetic construct
  misc_feature 1..37: note = Probe
  source 1..37: mol_type = other DNA
tttacagtcagaggttcaattcctcttcttaacaaca

SEQ ID NO: 55717 - DNA, 28 bp, synthetic construct
  misc_feature 1..28: note = Probe
  source 1..28: mol_type = other DNA
tttcaacttaacttgaccgctctgagct

SEQ ID NO: 55718 - DNA, 27 bp, synthetic construct
  misc_feature 1..27: note = Probe
  source 1..27: mol_type = other DNA
tttccgtagtgtagcggttatcacatt

SEQ ID NO: 55719 - DNA, 27 bp, synthetic construct
  misc_feature 1..27: note = Probe
  source 1..27: mol_type = other DNA
tttccgtagtgtagtggttatcacgtt

SEQ ID NO: 55720 - DNA, 30 bp, synthetic construct; identical to SEQ ID NO: 24813
  misc_feature 1..30: note = Probe
  source 1..30: mol_type = other DNA

SEQ ID NO: 55721 - DNA, 31 bp, synthetic construct; identical to SEQ ID NO: 24814
  misc_feature 1..31: note = Probe
  source 1..31: mol_type = other DNA

SEQ ID NO: 55722 - DNA, 46 bp, synthetic construct; identical to SEQ ID NO: 8532
  misc_feature 1..46: note = Probe
  source 1..46: mol_type = other DNA

SEQ ID NO: 55723 - DNA, 19 bp, synthetic construct
  misc_feature 1..19: note = Probe
  source 1..19: mol_type = other DNA
tttgggtccgagaggtccc

SEQ ID NO: 55724 - DNA, 24 bp, synthetic construct
  misc_feature 1..24: note = Probe
  source 1..24: mol_type = other DNA
tttgggtccgagaggtcccgggtt

SEQ ID NO: 55725 - DNA, 19 bp, synthetic construct
  misc_feature 1..19: note = Probe
  source 1..19: mol_type = other DNA
tttgggtgcgagaggtccc

SEQ ID NO: 55726 - DNA, 23 bp, synthetic construct
  misc_feature 1..23: note = Probe
  source 1..23: mol_type = other DNA
tttgggtgcgagaggtcccgggt

SEQ ID NO: 55727 - DNA, 24 bp, synthetic construct
  misc_feature 1..24: note = Probe
  source 1..24: mol_type = other DNA
tttgggtgcgagaggtcccgggtt

SEQ ID NO: 55728 - DNA, 42 bp, synthetic construct; identical to SEQ ID NO: 24831
  misc_feature 1..42: note = Probe
  source 1..42: mol_type = other DNA

SEQ ID NO: 55729 - DNA, 32 bp, synthetic construct
  misc_feature 1..32: note = Probe
  source 1..32: mol_type = other DNA
ggggaattagctcaagtggtagagcgcttgct

SEQ ID NO: 55730 - DNA, 32 bp, synthetic construct
  misc_feature 1..32: note = Probe
  source 1..32: mol_type = other DNA
ggggaattagctcaagcggtagagcgcttgct

SEQ ID NO: 55731 - DNA, 32 bp, synthetic construct
  misc_feature 1..32: note = Probe
  misc_feature 17: note = n refers to any nucleotide a, c, t, or g
  source 1..32: mol_type = other DNA
ggggaattagctcaagnggtagagcgcttgct

SEQ ID NO: 55732 - DNA, 22 bp, synthetic construct
  misc_feature 1..22: note = Probe
  source 1..22: mol_type = other DNA
gggggtgtagatcagtggtaga

SEQ ID NO: 55733 - DNA, 22 bp, synthetic construct
  misc_feature 1..22: note = Probe
  source 1..22: mol_type = other DNA
gggggtgtagctcagtggtaga

SEQ ID NO: 55734 - DNA, 24 bp, synthetic construct
  misc_feature 1..24: note = Probe
  source 1..24: mol_type = other DNA
gctccagtggcgcaatcggttagc

SEQ ID NO: 55735 - DNA, 38 bp, synthetic construct
  misc_feature 1..38: note = Probe
  source 1..38: mol_type = other DNA
gctccagtggcgcaatcggttagcatgcggtacttata

SEQ ID NO: 55736 - DNA, 72 bp, synthetic construct
  misc_feature 1..72: note = Probe
  source 1..72: mol_type = other DNA
tcctcgttagtatagtggtgagtatccccgcctgtcacgcgggagaccggggttcgattccccgacggggag

SEQ ID NO: 55737 - DNA, 21 bp, synthetic construct
  misc_feature 1..21: note = Probe
  source 1..21: mol_type = other DNA
attcttcttccgtgtggcagc

SEQ ID NO: 55738 - DNA, 30 bp, synthetic construct
  misc_feature 1..30: note = Probe
  source 1..30: mol_type = other DNA
ggccccattgtgtaatagttagcactctaa

SEQ ID NO: 55739 - DNA, 41 bp, synthetic construct
  misc_feature 1..41: note = Probe
  source 1..41: mol_type = other DNA
tcacgcgggagaccggggttcgattccccgacggggagcca

SEQ ID NO: 55740 - DNA, 23 bp, synthetic construct
  misc_feature 1..23: note = Probe
  source 1..23: mol_type = other DNA
ggttcgattccccgacggggagc

SEQ ID NO: 55741 - DNA, 22 bp, synthetic construct
  misc_feature 1..22: note = Probe
  source 1..22: mol_type = other DNA
gttcgattccccgacggggagc

SEQ ID NO: 55742 - DNA, 24 bp, synthetic construct
  misc_feature 1..24: note = Probe
  source 1..24: mol_type = other DNA
ggttcgattccccgacggggagcc

SEQ ID NO: 55743 - DNA, 23 bp, synthetic construct
  misc_feature 1..23: note = Probe
  source 1..23: mol_type = other DNA
gttcgattccccgacggggagcc

SEQ ID NO: 55744 - DNA, 26 bp, synthetic construct
  misc_feature 1..26: note = Probe
  source 1..26: mol_type = other DNA
gggttcgattccccgacggggagcca

SEQ ID NO: 55745 - DNA, 25 bp, synthetic construct
  misc_feature 1..25: note = Probe
  source 1..25: mol_type = other DNA
ggttcgattccccgacggggagcca

SEQ ID NO: 55746 - DNA, 24 bp, synthetic construct
  misc_feature 1..24: note = Probe
  source 1..24: mol_type = other DNA
gttcgattccccgacggggagcca
